(19) United States
(12) Patent Application Publication
(10) Pub. No.: US 2010/0003237 A1
(43) Pub. Date: Jan. 7, 2010

(54) In vivo temporal control of activatable matrix-degrading enzymes

(76) Inventors: Gilbert Keller, Belmont, CA (US); Gregory I. Frost, Del Mar, CA (US)

Correspondence Address: K&L Gates LLP, 3580 Carmel Mountain Road, Suite 200, San Diego, CA, 92130, US

(21) Appl. No.: 12/381,063

(22) Filed: Mar. 6, 2009

Related U.S. Application Data
(60) Provisional application No. 61/068,667, filed on Mar. 6, 2008.
(60) Provisional application No. 61/127,725, filed on May 14, 2008.

(51) Int. Cl. A61K 38/46; A61K 38/48; A61K 38/47; A61P 17/02

(52) U.S. Cl. 424/94.62; 424/94.63; 424/94.61

(57) ABSTRACT

Methods and combinations are provided for controlling the duration of action, in vivo, of matrix-degrading enzymes. The methods and combinations permit temporary in-vivo activation of matrix-degrading enzymes upon administration to the extra cellular matrix (or “ECM”). Matrix-degrading enzymes having a controlled duration of action can be used to treat ECM-mediated diseases or disorders characterized by increased deposition or accumulation of one or more ECM components.

### RELATED APPLICATIONS

[0001] Benefit of priority is claimed to U.S. Provisional Application Ser. No. 61/068,667, to Gilbert Keller and Gregory Frost, entitled “In Vivo Temporal Control of Activatable Matrix-Degrading Enzymes,” filed Mar. 6, 2008, and to U.S. Provisional Application Ser. No. 61/127,725, to Gilbert Keller and Gregory Frost, entitled “In Vivo Temporal Control of Activatable Matrix-Degrading Enzyme,” filed May 14, 2008. The subject matter of the above-noted applications are incorporated by reference in its entirety.

[0002] This application also is related to International PCT Application Serial No. (Attorney Dkt. No. 0119374-00101/3056PC), entitled “In Vivo Temporal Control of Activatable Matrix-Degrading Enzymes,” which claims priority to U.S. Provisional Application Ser. No. 61/068,667 and to U.S. Provisional Application Ser. No. 61/127,725. This application also is related to U.S. Provisional Patent Application Serial No. (Attorney Dkt. No. 119374-00103/p3077), entitled “Temperature Sensitive Mutants of Matrix Metalloproteases and Uses Thereof.” The subject matter of the above-noted related applications is incorporated by reference in its entirety.

### INCORPORATION BY REFERENCE OF SEQUENCE LISTING PROVIDED ON COMPACT DISCS

[0003] An electronic version on compact disc (CD-R) of the Sequence Listing is filed herewith in duplicate (labeled Copy # 1 and Copy # 2), the contents of which are incorporated by reference in their entirety. The computer-readable file on each of the aforementioned compact discs, created on Mar. 6, 2009, is identical, 1.96 megabytes in size, and titled 3056SEQ.001.txt.

### FIELD OF THE INVENTION

[0004] Methods and combinations are provided for controlling the duration of action, in vivo, of matrix-degrading enzymes. The methods and combinations permit temporary in vivo activation of matrix-degrading enzymes upon administration to the extra cellular matrix (or “ECM”). Matrix-degrading enzymes having a controlled duration of action can be used to treat ECM-mediated diseases or disorders characterized by increased deposition or accumulation of one or more ECM components.

### BACKGROUND

[0005] The extracellular matrix (ECM) provides a critical structural support for cells and tissues. Defects or changes in the extracellular matrix as a result of excessive deposition or accumulation of ECM components can lead to ECM-mediated diseases or conditions. Among these are collagen-mediated diseases or conditions characterized by the presence of abundant fibrous septae of collagen. Often the only approved treatment for such diseases or conditions is surgery, which can be highly invasive. Other treatments, such as needle aponeurotomy for the treatment of Dupuytren's syndrome (also called Dupuytren's contracture) or liposuction for cellulite, also are highly invasive.

[0006] Collagenase, an enzyme active at neutral pH that degrades collagen, has been used to treat ECM-mediated conditions such as cellulite (see e.g., published U.S. application serial No. US20070224184); Dupuytren's syndrome (see e.g. U.S. Pat. No. RE. 39941; 5,589,171; 6,086,872); and Peyronie's disease (see e.g., U.S. Pat. No. 6,022,539). Collagenase, however, is capable of irreversibly cleaving collagens of type I, II and III. The prolonged activity of collagenase limits the dosages that can be administered and also risks side effects associated with prolonged activation. Hence, there is a need for alternative treatments of ECM-mediated diseases and conditions. Accordingly, it is among the objects herein to provide methods and combinations of activatable matrix-degrading enzymes for the treatment of ECM-mediated diseases and conditions.

### SUMMARY

[0007] Provided are methods for treating diseases or conditions of the extracellular matrix (ECM) by administering an activatable matrix-degrading enzyme (AMDE) and an activator. Generally a therapeutically effective amount of the AMDE is administered. The amount is a function of the disease or condition treated and can be empirically determined. The AMDE that is selected is one that is inactive in the in vivo locus of administration, such as the ECM. AMDEs include naturally-occurring matrix-degrading (MD) enzymes, species and allelic and other variants thereof, such as enzymes modified to alter an activity, such as substrate specificity or property, such as stability. The AMDEs can be modified by processes and methods to have properties, such as increased specificity for a cleaving a particular type of collagen or to have an altered pH curve or optimum for the methods herein. Administration in conjunction with an activator or combination of activators, not present in the locus of administration results in an AMDE that is active for a limited period of time as the activator dissipates or is otherwise removed from the locus. The AMDE and activator can be administered sequentially, simultaneously in the same or separate composition, or intermittently. Conditions can be selected so that the period of time of activity is predetermined. An AMDE can require more than one activator for activity or full activity. The AMDE can be administered as a zymogen, as a full-length mature polypeptide, such as a single-chain or two-chain polypeptide, or as precursor polypeptide. The AMDE can be provided in a composition, such as a solution or suspension, or in crystallized or lyophilized form. Exemplary AMDEs include, but are not limited to, cathepsins, calpains and heparanases.

[0008] Generally, the AMDE is administered sub-epidermally. When administered to other loci, including topically, the AMDE is selected so that the AMDE is substantially active (typically at least about or 10%, 11%, 12%, 13% or 15% of the activity compared to at its pH maximum remains) at pH 5.5. In addition, for such administration, the AMDE typically is inactive (less than about or 10%, 11%, 12%, 13% or 15% of the activity remains) at neutral pH. Diseases and conditions of the ECM, include for example, collagen-mediated diseases and conditions. Such diseases and conditions include, but are not limited to: cellulite; Dupuytren's disease surgical adhesions, keloids, hypertrophic scars and depressed scars; Peyronie's disease; Ledderhose fibrosis; stiff joints; including a frozen shoulder; existing scars, including surgical adhesions, keloids, hypertrophic scars and depressed scars; scleroderma; lymphedema and collagenous colitis. Sub-epidermal administration includes, but is not limited to subcutaneous administration, intramuscular administration, intralesional administration and intradermal administration.

[0009] Thus, provided are methods for treating a disease or condition of the extracellular matrix (ECM) by sub-epidermally administering to the ECM an activatable matrix-degrading enzyme (AMDE) and an activator. The AMDE is inactive or partially inactive in the ECM in the absence of the activator; the activator, when administered to the ECM, provides an activating condition for the enzyme whereby the AMDE is active, and the activating condition is generally not present in the ECM prior to administration of the activator. In some embodiments the AMDE is selected to be an enzyme that is substantially inactive at neutral pH.

[0010] Also provided are methods of treating a disease or condition of the extracellular matrix (ECM) by administering an activatable matrix-degrading enzyme (AMDE) and an activator, wherein the AMDE is inactive at neutral pH, the activator provides an acidic pH activating condition for the enzyme such that the AMDE is active upon or after administration, and the activating condition is not present at the site of administration prior to administration of the activator; and the AMDE is substantially active at pH 5.5. The AMDE and activator can be administered by any suitable route, including, but not limited to, subcutaneous, intramuscular, intralesional, intradermal, topical, transdermal, intravenous, oral and rectal administration. For example, administration can be sub-epidermal administration.

[0011] Also provided are methods for treating a disease or condition of the extracellular matrix (ECM) by administering an activatable matrix-degrading enzyme (AMDE) and an activator, where the AMDE is inactive in the ECM in the absence of the activator such that the activator, when administered, provides an activating condition for the enzyme such that the AMDE is active, the activating condition is not present in the ECM prior to administration of the activator, and the activator is selected from among a metal ion, temperature and ionic strength of excipient, or a reducing or oxidizing agent. The AMDE and activator or combination of activators can be administered by any suitable route, including, but not limited to, subcutaneous, intramuscular, intralesional, intradermal, topical, transdermal, intravenous, oral and rectal administration. For example, administration can be sub-epidermal administration.

[0012] In an exemplary embodiment, provided are methods for treating a disease or condition of the extracellular matrix (ECM) by administering to the ECM an activatable matrix-degrading enzyme (AMDE) and an activator, where the AMDE is inactive in the ECM in the absence of the activator such that the activator, when administered to the ECM, provides an activating condition for the enzyme such that the AMDE is active, the activating condition is not present in the ECM prior to administration of the activator; and the activator is selected from among metal ions, temperature and ionic strength. The AMDE and activator can be administered by any suitable route, including, but are not limited to, subcutaneous, intramuscular, intralesional, intradermal, topical, transdermal, intravenous, oral and rectal administration. For example, administration can be sub-epidermal administration.

[0013] In other exemplary embodiments provided are methods for treating a collagen-mediated disease or condition by sub-epidermally administering to the ECM a therapeutically effective amount of an activatable cathepsin L and an activator, where the activatable cathepsin L is inactive in the ECM in the absence of the activator, the activator, when administered to the ECM, provides an activating condition for the enzyme such that the activatable cathepsin L is active, the activating condition is not present in the ECM prior to administration of the activator; and the activating condition is acidic pH. Exemplary cathepsin L polypeptides are those that include a sequence of amino acids set forth in SEQ ID NO:1 or allelic, species or other variant thereof, where such variants are modified to have altered properties or activities and, typically have at least or have 60%, 65%, 70%, 75%, 80%, 85%, 90%, 91%, 92%, 93%, 94%, 95%, 96%, 97%, 98% or 99% sequence identity compared to a sequence of amino acids set forth in any of SEQ ID NO:1.

[0014] In general over time in the methods herein, the activator will be removed or dissipated or neutralized by the local environment so that the AMDE is no longer active. Activating conditions and/or activators can be selected or prepared so that the AMDE is active for a limited or predetermined time. The activator can be provided or administered in the same composition as the AMDE or in a separate composition, and they can be administered sequentially, simultaneously or intermittently. For example, the AMDE is exposed to the activator prior to administration or upon administration, whereby the enzyme is active upon administration. Activating conditions include, but are not limited to, pH, ionic strength, temperature and metal ions. Among the activating conditions is pH, such as acidic pH, for example at or about in a range of 3 to 6.5, or 3.5 to 6, or 3 to 5.5, or 3 to 4.5, or 4 to 6, or 4 to 5.5, or 4.5 to 5, or 5 to 6, such as 3, 3.5, 4, 4.5, 5, 5.5, 6 or 6.5. pH can be obtained by contacting the AMDE with a buffered solution at the desired pH. Buffers can include those that contain an acid selected from among 2-(N-morpholino)ethanesulfonic acid (MES), acetic acid, citric acid, maleate, succinate, lactae, glycinate, citric phosphate and histidine. Other exemplary activity conditions include, but are not limited to, metal ions and temperature. For example, the activating condition can be a metal ion, such as Ca²⁺, Zn²⁺ or Mg²⁺. Temperature can be low or high temperature, where the enzyme is substantially inactive at the temperature of the locus of administration, typically 37° C. Thus, the activating condition is temperature and the temperature is or is about 20° C., 21° C., 22° C., 23° C., 24° C., 25° C., 26° C., 27° C., 28° C., 29° C., 30° C. or above 37° C., such as 40° C., 41° C., 42° C., 43° C., 44° C., 45° C., 46° C., 47° C., 48° C., 49° C., 50° C., 55° C., 60° C., 65° C., 70° C., 80° C. and higher up to any temperature tolerated that does not damage in vivo tissues or cells.

[0015] Temporal control of the activity can be achieved, for example, by selection of the buffering capacity of the buffer and/or ionic strength thereof. A predetermined time for activity can be effected by selection of such conditions, which can be determined empirically or by any method known to one of skill in the art. Predetermined times can range from less than or about a minute to hours, such as about or 1 minute, 2 minutes, 3 minutes, 4 minutes, 5 minutes, 6 minutes, 7 minutes, 8 minutes, 9 minutes, 10 minutes, 20 minutes, 30 minutes, 40 minutes, 50 minutes, 1 hour, 2 hours, 3 hours and 4 hours.

[0016] As noted an AMDE can be any matrix degrading enzyme that is activatable or that is modified so that it is activatable by a particular activator or activation condition. Among the AMDEs for use in the methods herein are lysosomal enzymes. AMDEs include, for example, cathepsins, such as cathepsins that are cysteine or aspartic proteases. These include, for example, cathepsin S, cathepsin K, cathepsin L, cathepsin B, cathepsin C, cathepsin H, cathepsin F, cathepsin O, cathepsin R, cathepsin V, cathepsin W, cathepsin D and cathepsin E. Exemplary of such cathepsins are any selected from a cathepsin that has a sequence of amino acids set forth in any of SEQ ID NOS: 57, 60, 1, 65, 180, 68, 71, 74, 77, 183, 186, 189, 80, 195, 90, 93 and 96, or an allelic, or species variant or other variant of any of SEQ ID NOS: 57, 60, 1, 65, 180, 68, 71, 74, 77, 183, 186, 189, 80, 195, 90, 93 and 96. Other variants, include, for example, enzymes modified to have an altered property, such as stability, or activity, such as substrate specificity. Variants can have, for example, 60%, 65%, 70%, 75%, 80%, 85%, 90%, 91%, 92%, 93%, 94%, 95%, 96%, 97%, 98%, 99% more sequence identity with any of the polypeptides whose sequence of amino acids is set forth in any of SEQ ID NOS: 57, 60, 1, 65, 180, 68, 71, 74, 77, 183, 186, 189, 80, 195, 90, 93 and 96.

[0017] In the methods herein, the AMDE, upon administration, can cleave any one or more extracellular matrix (ECM) components. Such cleavage occurs for a limited time, which can be predetermined. ECM components that are cleaved, include, but are not limited to, for example, collagens, elastins, fibronectins and proteoglycans, such as a type I, type II, type III or type IV collagen. The AMDEs can be modified, such as by directed evolution methods or other methods, to have altered properties or activities, such as increased substrate specificity for type I collagen over type IV collagen.

[0018] Other agents can be administered with the activator and enzymes. Administration can be in the same composition as the activator and/or enzyme or as separate compositions. Administration can be performed simultaneously, separately or intermittently. Exemplary agents, include, but are not limited to, for example, pharmacologic agents selected from among other biologics, small molecule compounds, dispersing agents, anesthetics and vasoconstrictors and/or combinations thereof. Exemplary of a dispersing agent is a hyaluronan degrading enzyme, for example a hyaluronidase, such as PH20, such as a soluble form thereof, particularly rHuPH20, Such a hyaluronidase typically is administered prior to administration of the enzyme and activator. Exemplary of a soluble hyaluronidase is the product designated rHuPH20, which is encoded by nucleic acid the encodes a polypeptide that has a sequence of amino acids set forth in SEQ ID NO:226, or is an allelic or species variant or other variant thereof or a variant of such polypeptide that has at least about 60%, 65%, 70%, 75%, 80%, 85%, 90%, 95%, 96%, 97%, 98%, 99% or more sequence identity to the sequence of amino acids set forth in SEQ ID NO:226.

[0019] Other agents include anesthetics, such as lidocaine, and vasoconstrictors, such as alpha adrenergic receptor agonists, including, for example, levonordefrin, epinephrine and norepinephrine. Typically such agents are administered with or before the AMDE and activator. Thus, provided are methods of treating a disease or condition of the extracellular matrix (ECM) by sub-epidermally administering an activatable matrix-degrading enzyme (AMDE), as described above, an activator, a hyaluronidase, lidocaine and epinephrine. The AMDE is inactive in the ECM in the absence of the activator. The enzyme, hyaluronidase, lidocaine and epinephrine can be administered simultaneously, sequentially or intermittently, provided that the lidocaine is administered prior to the enzyme. For example, the hyaluronidase, lidocaine and epinephrine are administered prior to administration of the enzyme or the hyaluronidase, lidocaine and epinephrine are administered simultaneously or the hyaluronidase, lidocaine and epinephrine can be administered in a single composition. The AMDE and activator and other agents can be administered by any suitable route, including, but not limited to, subcutaneous, intramuscular, intralesional, intradermal, topical, transdermal, intravenous, oral and rectal administration. For example, administration can be sub-epidermal administration.

[0020] Also provided are products, including compositions, containers, combinations and kits that can be used to effect the methods. For example, provided are containers that contain two compartments. A first compartment contains a therapeutically effective amount of an activatable matrix-degrading enzyme (AMDE), where the amount is for single dosage or a plurality of dosages and a single dosage is effective for treatment of a disease or condition of the ECM; and a second compartment contains an activator, where the activator is one that activates the enzyme. AMDEs include, for example lysosomal enzymes, such as cathepsins, calpains and heparanases, including those described above for use in the methods. The AMDEs in the containers are those as described above, including, for example, an AMDE that is substantially active at pH 5.5, and, optionally is substantially inactive at neutral pH. The activators provide for activating conditions such as those described above. Hence the second compartment can contain a composition that effects a change or maintains a pH, such as a buffer, or ionic strength or provides a metal ion, such as Ca²⁺, Zn²⁺, Mg²⁺. Exemplary buffers include those that contain acids from among 2-(N-morpholino)ethanesulfonic acid (MES), acetic acid, citric acid, maleaste, succinate, lactate, glycinate, citric phosphate and histidine. The diseases and conditions, include those described above. The containers can also include a mixing compartment to effect mixing of the components in the first and second compartments. Exemplary containers, include tubes and bottles, sterile contains, such a syringe, with or without a needle for injection.

[0021] The AMDE and activator are provided in an amount for single or multiple dosage administration. The AMDE in the container can be provided in an amount that is or is about 10 μg to 100 mg, 50 μg to 75 mg, 100 μg to 50 mg, 250 μg to 25 mg, 500 μg to 10 mg, 1 mg to 5 mg, or 2 mg to 4 mg. It can be provided as a solid, such as in crystallized form or lyophilized form, or in liquid form, such as solution or suspension, a gel or other suitable form. The total volume of liquid in the container, for example, can be or is about 1-100 ml, 1-50 ml, 10-50 ml, 10-30 ml, 1-20 ml, and 1-10 ml.

[0022] In an exemplary embodiment provided are containers that have at least two compartments, where a first compartment contains a therapeutically effective amount of an activatable cathepsin L and the amount is effective for treatment of a disease or condition of the extracellular matrix (ECM); and a second compartment contains an acidic buffer that is one that activates the cathepsin L. The diseases and conditions are those described above for the method of treatment. The activator can be pH that is provided by a buffer, particularly an acidic buffer has a range that is or is about pH 4.0-5.0, particularly 4.5 to 6, more particularly, 4.0, 4.5, 5, 5.5 or 6. Exemplary buffers are among acidic buffers that contain an acid, such as, 2-(N-morpholino)ethanesulfonic acid (MES), acetic acid, citric acid, succinic acid, lactic acid, maleic acid, glycine-hydrochloric acid, citric phosphate and histidine. Exemplary cathepsin L polypeptides are those that include a sequence of amino acids set forth in SEQ ID NO:1 or allelic, species or other variant thereof, where such variants are modified to have altered properties or activities and, typically have at least or have 60%, 65%, 70%, 75%, 80%, 85%, 90%, 91%, 92%, 93%, 94%, 95%, 96%, 97%, 98% or 99% sequence identity compared to a sequence of amino acids set forth in any of SEQ ID NO:1. The activatable cathepsin L can be provided as a lyophilized powder, particularly of an activated mature form that is two-chain or single-chain form. The amount of activatable cathepsin L in the container is therapeutically effective for the particular disease or condition, and can range, for example, from about or: 10 μg to or 100 mg, 50 μg to 75 mg, 100 μg to 50 mg, 250 μg to 25 mg, 500 μg to 10 mg, 1 mg to 5 mg and 2 mg to 4 mg. The particular amount can depend on the particular disease or condition, and, if necessary, can be empirically determined. The cathepsin L can be provided as a solid, such as a lyophilized powder, a paste or liquid, such as a suspension, dispersion, or solution. The volume in the container is suitable for the amount of cathepsin L and the intended route and/or locus of administration. For example, a typical volume in the container is or is about 1-100 ml, 1-50 ml, 10-50 ml, 10-30 ml, 1-20 ml, or 1-10 ml.

[0023] Also provided are combinations that include the above-described container(s) and one or more additional containers containing another pharmacologically effective agent. Such agents can be selected from among biologics, small molecule compounds, dispersing agents, anesthetics and vasoconstrictors and combinations thereof. These agents include the agents and amounts as described above with reference to the methods. For example, an additional container can contain a hyaluronidase, such as rHuPH20. The amount can be for example from about/or: 10 Units to 500,000 Units, 100 Units to 100,000 Units, 500 Units to 50,000 Units, 1000 Units to 10,000 Units, 5000 Units to 7500 Units, 5000 Units to 50,000 Units, or 1,000 Units to 10,000 Units. Other containers can contain anesthetics, such as lidocaine, in an amount, for example of at or about 10 mg to 1000 mg, 100 mg to 500 mg, 200 mg to 400 mg, 20 mg to 60 mg, or 30 mg to 50 mg, and/or a vasoconstrictor, such as an alpha adrenergic receptor agonist, including levonordefrin, epinephrine or norepinephrine in an amount to effect vasoconstriction at the locus and region of administration. The amount, for example, can be at or about 10 μg to 5 mg, 50 μg to 1 mg, 50 μg to 500 μg, 50 μg to 250 μg, 100 μg to 500 μg, 200 μg to 400 μg, 1 mg to 5 mg or 2 mg to 4 mg of, for example, epinephrine or other vasoconstrictor. Each of the additional pharmacologically effective agents can be mixed in any combination in one container or can be provided in single containers. They can be provided as liquids or solids as exemplified and described above for cathepsin L.

[0024] In exemplary embodiments, the combinations, can contain the AMDE and activator, and the container can contain at least two pharmacologically effect agents, where the pharmacologic agents are provided as separate compositions separated from each other or are provided in the same container in the same composition. For example, the additional container can contain one or more of a hyaluronidase, lidocaine and epinephrine. The additional container can be in the form of a syringe with or without a needle. The total volume in the additional container(s) is or is about 1-100 ml, 1-50 ml, 10-50 ml, 10-30 ml, 1-20 ml, or 1-10 ml.

[0025] In exemplary embodiments, the combination includes cathepsin L and the hyaluronidase, such as rHuPH20. They can be provided as separate compositions or are in a single composition in one container. The combination can include an acidic buffer that activates the cathepsin L. The buffer can be provided in a separate container or mixed with one or both of the cathepsin L and hyaluronidase. Also provided are pharmaceutical compositions that contain an amount of cathepsin L effective for treatment of an ECM-mediated disease or condition upon administration simultaneously or sequentially with an acidic buffer, where the composition is formulated for single dosage administration; and the buffer has a pH that activates cathepsin L. The amount of cathepsin L is effective for the particular disease or condition, and for example, is or is about 10 μg to 100 mg, 50 μg to 75 mg, 100 μg to 50 mg, 250 μg to 25 mg, 500 μg to 10 mg, 1 mg to 5 mg, or 2 mg to 4 mg. The composition can further contain one or more of lidocaine, epinephrine and a hyaluronidase.

[0026] The containers and/or combinations and compositions can be packaged as kits. The kits contain the containers and/or combinations and optionally additional reagents for use in the methods provided herein, devices for administration, such as vials, tubes, syringes and needles, provided herein and/or instructions for such use.

### BRIEF DESCRIPTION OF THE FIGURES

[0027] FIG. 1 is an alignment of zymogen MMPs, indicating the propeptide, the catalytic domain, linker region, hemopexin domains 1-4, fibronectin type II repeats, the basic region, the cysteine switch, the calcium (Ca) binding sites I and II, and the zinc binding site. The alignment includes zymogen MMPs, including MMP-1 (SEQ ID NO:327), MMP-8 (amino acids 21-467 of SEQ ID NO:101), MMP-13 (amino acids 20-471 of SEQ ID NO:104), MMP-18 (amino acids 18-467 of SEQ ID NO:107), MMP-2 (amino acids 30-660 of SEQ ID NO:110), MMP-9 (amino acids 20-707 of SEQ ID NO:113), MMP-3 (amino acids 18-477 of SEQ ID NO:116), MMP-10 (amino acids 18-476 of SEQ ID NO:119), MMP-11 (amino acids 32-488 of SEQ ID NO:122), MMP-7 (amino acids 18-267 of SEQ ID NO:125), MMP-26 (amino acids 18-261 of SEQ ID NO:128), MMP-12 (amino acids 17-470 of SEQ ID NO:131), and MMP-19 (amino acids 19-508 of SEQ ID NO:146). A “*” means that the residues or nucleotides in that column are identical in all sequences in the alignment, a “:” means that conserved substitutions have been observed, and a “.” means that semi-conserved substitutions are observed.

[0028] FIG. 2 is an alignment of the catalytic domains of exemplary MMPs, indicating exemplary conserved and conservative amino acid residues. It is understood that other conserved and conservative amino acid residues exist between and among MMPs. Thus, this figure and identification of residues is not intended to limit corresponding residues between and among MMPs. The exemplary MMPs include: MMP-1 (amino acids 81-242 of SEQ ID NO:327), MMP-8 (amino acids 101-242 of SEQ ID NO:101), MMP-13 (amino acids 104-248 of SEQ ID NO:104), MMP-18 (amino acids 100-246 of SEQ ID NO:107), MMP-2 (amino acids 110-417 of SEQ ID NO:110), MMP-9 (amino acids 94-425 of SEQ ID NO:113), MMP-3 (amino acids 100-247 of SEQ ID NO:116), MMP-10 (amino acids 99-246 of SEQ ID NO:119), MMP-11 (amino acids 98-228 of SEQ ID NO:122), MMP-7 (amino acids 95-242 of SEQ ID NO:125), MMP-26 (amino acids 90-236 of SEQ ID NO:128), MMP-12 (amino acids 106-247 of SEQ ID NO:131), and MMP-19 (amino acids 98-239 of SEQ ID NO:146). Exemplary conserved and conservative substitutions are highlighted.

### DETAILED DESCRIPTION

Outline

| A. | Definitions | |
|---|---|---|
| B. | The Extracellular Matrix | |
| | 1. | Components of the ECM |

| | |
|---|---|
| a. | Collagens |
| b. | Elastin |
| c. | Fibronectin |
| d. | Glycosaminoglycans (GAGs) |

| | |
|---|---|
| i. | Proteoglycans |
| ii. | Hyaluronic Acid |

| | |
|---|---|
| 2. | Histology of the Skin |

| | |
|---|---|
| a. | The Epidermis |
| b. | The Dermis |
| c. | The Hypodermis |

| | 3. | Diseases of the ECM |
|---|---|---|
| C. | Matrix-Degrading Enzymes | |
| | 1. | Enzyme Activation |

| | |
|---|---|
| a. | Serine Proteases |
| b. | Cysteine Proteases |

| | |
|---|---|
| i. | Cathepsins |
| | Cathepsin L |
| ii. | Calpain |

| | |
|---|---|
| c. | Aspartic Proteases |
| d. | Metalloproteases |
| e. | Heparanase |

| D. | Activatable Matrix-Degrading Enzymes (AMDE) | |
|---|---|---|
| | 1. | Activating Conditions and Methods for Activation of |
| | | Activatable Matrix-Degrading Enzymes |

| | |
|---|---|
| a. | Activating Condition - Acidic pH |
| b. | Activating Condition - Metal Cation Concentration |
| c. | Activating Condition - Reducing Agent |
| d. | Activating Condition - Temperature |

| | |
|---|---|
| i. | Temperature-Sensitive Matrix Metalloprotease |
| | Mutants |

| | |
|---|---|
| 1) | Exemplary tsMMP-1 Modifications |
| 2) | Combinations |
| 3) | Additional Modifications |
| 4) | Other MMPs |

| | 2. | Combinations of Matrix-Degrading Enzymes and Activator |
|---|---|---|
| E. | Methods of Producing Nucleic Acids Encoding Matrix-Degrading | |
| | Enzymes, and Polypeptides Thereof | |
| | 1. | Vectors and Cells |
| | 2. | Expression |

| | |
|---|---|
| a. | Prokaryotic Cells |
| b. | Yeast Cells |
| c. | Insect Cells |
| d. | Mammalian Cells |
| e. | Plants |

| | 3. | Purification Techniques |
|---|---|---|
| F. | Preparation, Formulation and Administration of Activatable | |
| | Matrix-Degrading Enzymes | |
| | 1. | Injectables, solutions and emulsions |
| | | Lyophilized Powders |
| | 2. | Topical Administration |
| | 3. | Compositions for other routes of administration |
| | 4. | Combination Therapies |

| | |
|---|---|
| a. | Hyaluronan Degrading Enzymes |

| | |
|---|---|
| i. | Hyaluronidases |

| | |
|---|---|
| 1) | Mammalian-type hyaluronidases |
| 2) | Bacterial Hyaluronidases |
| 3) | Hyaluronidases from leeches, other |
| | parasites and crustaceans |

| | |
|---|---|
| ii. | Other hyaluronan degrading enzymes |
| iii. | Soluble hyaluronan degrading enzymes |

| | |
|---|---|
| 1) | Soluble Human PH20 |
| 2) | rHuPH20 |

| | |
|---|---|
| iv. | Modifications of hyaluronan degrading enzymes |
| | to improve their pharmacokinetic properties |

| G. | Packaging and Articles of Manufacture of Activatable Matrix- | |
|---|---|---|
| | Degrading Enzymes | |
| | 1. | Single Chamber Apparatus |
| | 2. | Dual Chamber Apparatus |
| | 3. | Kits |
| H. | Methods of Assessing Activity of Matrix-Degrading Enzymes | |
| | 1. | Methods of Assessing Enzymatic Activity |
| | 2. | Methods of Assessing ECM Degradation |

| | |
|---|---|
| a. | In vitro assays |
| b. | In vivo assays |
| c. | Non-human animal models |

| | |
|---|---|
| I. | Exemplary Methods of Treating Diseases or Defects of ECM |
| | Collagen-Mediated Diseases or Conditions |

| | |
|---|---|
| a. | Cellulite |
| b. | Dupuytren's Disease |
| c. | Peyronie's Disease |
| d. | Ledderhose Fibrosis |
| e. | Stiff Joints |
| f. | Existing Scars |

| | |
|---|---|
| i. | Surgical Adhesions |
| ii. | Keloids |
| iii. | Hypertrophic scars |
| iv. | Depressed Scars |

| | |
|---|---|
| g. | Scleroderma |
| h. | Lymphedema |
| i. | Collagenous colitis |

| | |
|---|---|
| J. | Examples |

### A. DEFINITIONS

[0030] Unless defined otherwise, all technical and scientific terms used herein have the same meaning as is commonly understood by one of skill in the art to which the invention(s) belong. All patents, patent applications, published applications and publications, Genbank sequences, databases, websites and other published materials referred to throughout the entire disclosure herein, unless noted otherwise, are incorporated by reference in their entirety. In the event that there are a plurality of definitions for terms herein, those in this section prevail. Where reference is made to a URL or other such identifier or address, it understood that such identifiers can change and particular information on the internet can come and go, but equivalent information can be found by searching the internet. Reference thereto evidences the availability and public dissemination of such information.

[0031] As used herein, the extracellular matrix (ECM) refers to a complex meshwork structure that surrounds and provides structural support to cells of specialized tissues and organs. The ECM is made up of structural proteins such as collagen and elastin; specialized proteins such as fibronectin; and proteoglycans. The exact biochemical composition varies from tissue to tissue. In the skin, for example, it is the dermal layer that contains the ECM. Reference to the “interstitium” is used interchangeably herein to refer to the ECM.

[0032] As used herein, components of the ECM refers to any material produced by cells of connective tissue and secreted into the interstitium. For purposes herein, references to ECM components refers to proteins and glycoproteins, and not to other cellular components or other components of the ECM. Exemplary ECM components include, but are not limited to, collagen, fibronectin, elastin and proteoglycans.

[0033] As used herein, a matrix degrading enzyme refers to any enzyme that degrades one or more components of the ECM. Matrix-degrading enzymes include protease, which are enzymes that catalyze the hydrolysis of covalent peptidic bonds. Matrix-degrading enzymes include any known to one of skill in the art, such as any described herein (see, e.g., Table 3), allelic or species variants or other variants thereof.

[0034] As used herein, a matrix metalloprotease (MMP) refers to a type of matrix degrading enzyme that are zinc-dependent endopeptidases that contain an active site Zn²⁺ required for activity. MMPs include enzymes that degrade components of the ECM including, but not limited to, collagen, fibronectin, elastin and proteoglycans. MMPs generally contain a propeptide, a catalytic domain, a proline linker and a hemopexin (also called haemopexin-like C-terminal) domain. Some MMPs contain additional domains. Exemplary MMPs are set forth in Table 5. Reference to an MMP includes all forms, for example, the precursor form (containing the signal sequence), the proenzyme form (containing the propeptide), the processed active form, and forms thereof lacking one or more domains. For example, reference to an MMP refers to MMPs containing only the catalytically active domain. Domains of exemplary MMPs are identified in FIG. 1. MMPs also include allelic or species variants or other variants thereof.

[0035] As used herein, a modified matrix-degrading enzyme (or variant of a matrix-degrading enzyme) refers to an enzyme that has one or more modifications in primary sequence compared to a wild-type enzyme. The one or more mutations can be one or more amino acid replacements (substitutions), insertions, deletions and any combination thereof. A modified enzyme includes those with 1, 2, 3, 4, 5, 6, 7, 8, 9, 10, 11, 12, 13, 14, 15, 16, 17, 18, 19, 20 or more modified positions. A modified enzyme retains the activity of a wild-type enzyme, but may have altered substrate specificity or stability. A modified enzyme typically has 60%, 70%, 80%, 85%, 90%, 91%, 92%, 93%, 94%, 95%, 96%, 97%, 98%, 99% or more sequence identity to a corresponding sequence of amino acids of a wildtype enzyme.

[0036] As used herein, a lysosomal enzyme refers to enzymes whose degradative function is optimal at acidic pH. By virtue of the requirement of low pH, such enzymes generally are present in the lysosomes of cells. Lysosomal enzymes include, but are not limited to, cathepsin S, K, L B, C, H, F, O, R, V, D and E. Exemplary of lysosomal enzymes include precursor forms set forth in any of SEQ ID NOS:56, 59, 62, 64, 179, 67, 70, 73, 76, 182, 185, 188, 79, 194, 89, 92 and 95 and mature forms thereof set forth in SEQ ID NOS:57, 60, 1, 65, 180, 68, 71, 74, 77, 183, 186, 189, 80, 195, 90, 93 and 96 or allelic variants or species variants or other variants thereof. Other lysosomal enzymes include, but are not limited to, lysosomal acid lipase, gastric lipase, lysosomal phospholipase and bile salt-activated lipase (nucleic acid sequences encoding amino acids sequences, including mature forms thereof, are set forth in any of SEQ ID NOS: 196-207).

[0037] As used herein, a temperature sensitive (ts) mutant or mutation or variant or modification conferring temperature sensitivity refers to a polypeptide that is modified to exhibit higher enzymatic activity at some temperatures called permissive temperatures compared to other temperatures called nonpermissive temperatures. Generally, a temperature-sensitive mutant exhibits higher enzymatic activity at lower temperatures then at higher temperatures.

[0038] As used herein, permissive temperature is the temperature at which a polypeptide exhibits a higher enzymatic activity then at a second temperature called the nonpermissive temperature. Hence, the modified enzymes provided herein exhibit different activities at different temperatures that is higher at one temperature then at another temperature. The temperature at which it exhibits more activity is the permissive temperature.

[0039] As used herein, a nonpermissive temperature is the temperature where a polypeptide exhibits lower enzymatic activity then at the permissive temperature and exhibits reduced activity compared to the enzyme that is not modified. Temperature-sensitive mutants provided herein exhibit enzymatic activity at the nonpermissive temperature that is at or about 1%, 2%, 3%, 4%, 5%, 6%, 7%, 8%, 9%, 10%, 20%, 30%, 40%, 50%, 60%, 70%, 80% or 90% up to less then 100% the activity at the permissive temperature. The temperature sensitive mutants provided herein also exhibit 1%, 2%, 3%, 4%, 5%, 6%, 7%, 8%, 9%, 10%, 20%, 30%, 40%, 50%, 60%, 70%, 80% or 90% up to less then 100% of the activity at the nonpermissive temperature compared to the enzyme that is not modified (e.g. wildtype enzyme) at the nonpermissive temperature.

[0040] As used herein, the ratio of enzymatic activity at the permissive temperature compared to the nonpermissive temperature refers to the relation of enzymatic activity at the permissive and nonpermissive temperatures. It is expressed by the quotient of the division of the activity at the permissive temperature by the activity at the nonpermissive temperature.

[0041] As used herein, physiological temperature refers to temperature conditions maintained in the body, which is approximately 37° C., for example, at or about 34° C., 35° C., 36° C., 37°, 38° C. or 39° C. It is understood that the normal range of a human body temperature varies depending on factors such as the rate of metabolism, the particular organ and other factors. For purposes herein, physiological temperature is the temperature that exists for a non-fasting, comfortably dressed subject that is indoors in a room that is kept at a normal room temperature (e.g. 22.7 to 24.4° C.).

[0042] As used herein, reversible refers to a modified enzyme whose activity at the permissive temperature is capable of being recovered or partially recovered upon exposure to the nonpermissive temperature and reexposure to the permissive temperature. Hence, the activity of a reversible enzyme once it is exposed to the nonpermissive temperature is the same or substantially retained compared to the activity of the enzyme exposed only to the permissive conditions and is greater then the activity of the enzyme exposed only to the nonpermissive temperature. For example, upon return to permissive conditions from nonpermissive conditions, reversible enzymes exhibit at or about 120%, 125%, 130%, 140%, 150%, 160%, 170%, 180%, 200% or more the activity of the enzyme exposed only to the nonpermissive temperatures and retain the activity of the enzyme exposed only to the permissive temperature.

[0043] As used herein, irreversible or nonreversible refers to a modified enzyme whose enzymatic activity at the permissive temperature is not recovered upon exposure to the nonpermissive temperature and reexposure to the permissive temperature. Hence, the activity of an irreversible enzyme once it is exposed to the nonpermissive temperature is less then the activity of the enzyme exposed only to the permissive temperature and also is less then or the same or substantially the same as the activity of the enzyme exposed only to the nonpermissive conditions. For example, upon return to permissive conditions, irreversible enzymes exhibit at or about 20%, 30%, 40%, 50%, 60%, 70%, 80%, 90%, 100%, 105%, 110%, 115%, or 120% the activity at nonpermissive temperatures and less then 100% of the activity at the activity of the enzyme exposed only to the permissive temperature.

[0044] As used herein, a domain refers to to a portion (a sequence of three or more, generally 5 or 7 or more amino acids) of a polypeptide that is a structurally and/or functionally distinguishable or definable. For example, a domain includes those that can form an independently folded structure within a protein made up of one or more structural motifs (e.g. combinations of alpha helices and/or beta strands connected by loop regions) and/or that is recognized by virtue of a functional activity, such as kinase activity. A protein can have one, or more than one, distinct domain. For example, a domain can be identified, defined or distinguished by homology of the sequence therein to related family members, such as homology and motifs that define an extracellular domain. In another example, a domain can be distinguished by its function, such as by enzymatic activity, e.g. kinase activity, or an ability to interact with a biomolecule, such as DNA binding, ligand binding, and dimerization. A domain independently can exhibit a function or activity such that the domain independently or fused to another molecule can perform an activity, such as, for example proteolytic activity or ligand binding. A domain can be a linear sequence of amino acids or a non-linear sequence of amino acids from the polypeptide. Many polypeptides contain a plurality of domains. For example, the domain structure of MMPs is set forth in FIG. 1. Those of skill in the art are familiar with domains and can identify them by virtue of structural and/or functional homology with other such domains.

[0045] As used herein, a catalytic domain refers to any part of a polypeptide that exhibits a catalytic or enzymatic function. Such domains or regions typically interact with a substrate to result in catalysis thereof. For MMPs, the catalytic domain contains a zinc binding motif, which contains the Zn²⁺ ion bound by three histidine residues and is represented by the conserved sequence HExxHxxGxxH.

[0046] As used herein, a proline rich linker (also called the hinge region) refers to a flexible hinge or linker region that has no determinable function. Such a region is typically is found between domains or regions and contributes to the flexibility of a polypeptide.

[0047] As used herein, a hemopexin binding domain or haemopexin-like C-terminal domain refers to the C-terminal region of MMP. It is a four bladed β-propeller structure, which is involved in protein-protein interations. For example, the hemopexin binding domain of MMPs interact with various substrates and also interact with inhibitors, for example, tissue inhibitor of metalloproteases (TIMPs).

[0048] As used herein, consisting essentially of or recitation that a polypeptide consists essentially of a particular domain, for example the catalytic domain means that the only MMP portion of the polypeptide is the domain or a catalytically active portion thereof. The polypeptide optionally can include additional non-MMP-derived sequences of amino acids, typically at least 3, 4, 5, 6 or more, such as by insertion into another polyeptide or linkage thereto.

[0049] As used herein, a “zymogen” refers to an enzyme that is an inactive precursor and requires some change, such as proteolysis of the polypeptide, to become active. Some zymogens also require the addition of cofactors such as, but not limited to, pH, ionic strength, metal ions or temperature for activation. Zymogens include the proenzyme form of enzymes. Hence, zymogens, generally, are inactive and can be converted to a mature polypeptide by catalytic or autocatalytic cleavage of the proregion from the zymogen in the presence or absence of additional cofactors.

[0050] As used herein, a prosegment or proregion refers to a region or a segment that is cleaved to produce a mature protein. This can include segments that function to suppress the enzymatic activity by masking the catalytic machinery. A proregion is a sequence of amino acids positioned at the amino terminus of a mature polypeptide and can be as little as a few amino acids or can be a multidomain structure.

[0051] As used herein, an activation sequence refers to a sequence of amino acids in a zymogen that are the site required for activation cleavage or maturation cleavage to form an active protease. Cleavage of an activation sequence can be catalyzed autocatalytically or by activating partners.

[0052] Activation cleavage is a type of maturation cleavage in which a conformational change required for activity occurs. Activation can result in production of multi-chain forms of the proteases, for example, two-chain forms. In some instances, single chain forms of the protease can exhibit proteolytic activity as a single chain.

[0053] As used herein, a cofactor refers to a condition or factor that is required for activity of an enzyme. Cofactors includes anything required for enzymatic activity. Examples of cofactors include, but are not limited to, pH, ionic strength, metal ions or temperature. With reference to in vivo administration of an enzyme, cofactors include endogenously present factors and exogenously provided factors.

[0054] As used herein, an activating condition refers to any physical condition or combination of conditions that is required for an enzyme's activity. For purposes herein, an activating condition for an activatable matrix-degrading enzyme (AMDE) includes those that are not present at the site of administration, for example, not present in the extracellular matrix, in amounts (i.e. quantity, degree, level or other physical measure) required for activation of the enzyme. Exemplary of activating conditions include, but are not limited to, pH, metal ions, reducing or oxidizing agents, temperature and ionic strength. For example, in the case of lysosomal matrix degrading-enzymes that are active at conditions of low pH but inactive at neutral pH, exposure of the inactive enzyme to an activating condition that is acidic pH results in activation of the enzyme. By virtue of the fact that the activating condition is not present at the site of administration of the enzyme, but must be added exogenously, the activating condition will dissipate and/or be neutralized over time, such that the activating condition is no longer present to activate the enzyme. Hence, the enzyme will be active for a limited or predetermined time upon administration.

[0055] As used herein, an activator refers to any composition that provides an activating condition for an activatable matrix-degrading enzyme. Examples of activators include, but are not limited to an acidic pH buffer, a cold buffer, or a calcium buffer.

[0056] As used herein, an “activatable matrix-degrading enzyme (AMDE)” refers to a matrix degrading enzyme that requires an activating condition in order to be active. For purposes herein, for example, an AMDE is substantially inactive in the ECM unless exposed to activators before, with or subsequent to administration of the AMDE, thereby providing an activating condition for the enzyme. Hence, activation of activatable enzymes is controlled by exogenous conditions so that the period of time at an in vivo locus or site during which the enzyme is active can be predetermined and/or controlled as a result of the dissipation and/or neutralization of the activation condition (i.e. temporally controllable or time-controlled). Thus, by virtue of exposure to an activating condition, the enzymes are active for a limited time and/or to a limited extent in the ECM (i.e. are conditionally active). The extent and time of activation can be controlled by selection of activator or activating conditions, and can be for a predetermined time. For example, a lysosomal enzyme, such as a cathepsin L, is activatable in that it can be activated by exposure to the activating condition of pH, such as provided by an acidic buffered solution. Upon administration of the activated enzyme to the neutral pH environment of the ECM, the pH environment will return to neutrality in a time period that can be predetermined based upon the buffering capacity of the acidic buffer, such that the enzyme will become inactive.

[0057] As used herein, “amount of an activator” refers to the quantity, degree or level of an activator. The amount of an activator can be a concentration or absolute amount, or a particular temperature or pH. For purposes herein, the amount of an activator is typically an amount that is sufficient to result in the conditional activation of an enzyme. The amount can be adjusted to alter the duration of activation so that activation can be for a limited or predetermined time.

[0058] As used herein, a “therapeutically effective amount” or a “therapeutically effective dose” refers to an agent, compound, material, or composition containing a compound that is at least sufficient to produce a therapeutic effect.

[0059] As used herein, an enzyme that is active for a limited time or for limited duration refers to an active enzyme having activity that dissipates and/or is neutralized over time. Thus, by virtue of the absence of an activation condition, the enzyme is rendered inactive.

[0060] As used herein, predetermined time means a limited that that is known before and can be controlled. The dissipation and/or neutralization of an activation condition required for an enzyme's activity can be titrated so that the time required for an active enzyme to become inactive is known. For example, an acid activated enzyme that is administered in acid medium and exposed to an in vivo environment having a neutral pH (i.e. the ECM) will, over time, be exposed to a gradually increased pH such that the enzyme will remain active for only a limited time. The rate of pH increase can be controlled, for example, by varying buffering capacity of the acidic buffer such that the period of time required for an active enzyme to become inactive can be pre-determined. For purposes herein, an enzyme can be active for a predetermined time that is or is about 1 minute, 2 minutes, 3 minutes, 4 minutes, 5 minutes, 6 minutes, 7 minutes, 8 minutes, 9 minutes, 10 minutes, 15 minutes, 20 minutes, 30 minutes, 1 hour, 2 hours, 3 hours, or 4 hours.

[0061] As used herein, substantially inactive at neutral pH means that the enzyme, when at neutral pH, exhibits less than 10% of the activity of the enzyme at its pH optima under similar conditions (except for the pH differences), i.e. assay, buffer, ionic strength.

[0062] As used herein, substantially active at pH 5.5 means that the enzyme, when at pH 5.5, exhibits greater than 10%, for example, 20%, 30%, 40%, 50%, 60%, 70%, 80%, 90%, 95%, 96%, 97%, 98%, 99% or 100% of the activity of the enzyme at its pH optima under similar conditions (except for the pH differences), i.e. assay, buffer, ionic strength.

[0063] As used herein, sub-epidermal administration refers to any administration that results in delivery of the enzyme under the outer-most layer of the skin. Sub-epidermal administration does not include topical application onto the outer layer of the skin. Examples of sub-epidermal administrations include, but are not limited to, subcutaneous, intramuscular, intralesional and intradermal routes of administration.

[0064] As used herein, substrate refers to a molecule that is cleaved by an enzyme. Minimally, a target substrate includes a peptide containing the cleavage sequence recognized by the protease, and therefore can be two, three, four, five, six or more residues in length. A substrate also includes a full-length protein, allelic variant, isoform or any portion thereof that is cleaved by an enzyme. Additionally, a substrate includes a peptide or protein containing an additional moiety that does not affect cleavage of the substrate by the enzyme. For example, a substrate can include a four amino acid peptide, or a full-length protein chemically linked to a fluorogenic moiety.

[0065] As used herein, cleavage refers to the breaking of peptide bonds or other bonds by an enzyme that results in one or more degradation products.

[0066] As used herein, activity refers to a functional activity or activities of a polypeptide or portion thereof associated with a full-length (complete) protein. Functional activities include, but are not limited to, biological activity, catalytic or enzymatic activity, antigenicity (ability to bind or compete with a polypeptide for binding to an anti-polypeptide antibody), immunogenicity, ability to form multimers, and the ability to specifically bind to a receptor or ligand for the polypeptide.

[0067] As used herein, enzymatic activity or catalytic activity or cleavage activity refers to the activity of a protease as assessed in in vitro proteolytic assays that detect proteolysis of a selected substrate.

[0068] As used herein, an active enzyme refers to an enzyme that exhibits enzymatic activity. For purposes herein, active enzymes are those that cleave any one or more components of the ECM, such as collagen. Active enzymes include those in single-chain or two-chain form.

[0069] As used herein, an inactive enzyme refers to an enzyme that exhibits substantially no activity (i.e. catalytic activity or cleavage activity), such as less than 10% of the maximum activity of the enzyme. The enzyme can be inactive by virtue of its conformation, the absence of an activating conditions required for its activity, or the presence of an inhibitor or any other condition or factor or form that renders the enzyme substantially inactive.

[0070] As used herein, a human protein is one encoded by a nucleic acid molecule, such as DNA, present in the genome of a human, including all allelic variants and conservative variations thereof. A variant or modification of a protein is a human protein if the modification is based on the wildtype or prominent sequence of a human protein.

[0071] As used herein, a hyaluronan degrading enzyme refers to an enzyme that catalyzes the cleavage of a hyaluronan polymer (also referred to as hyaluronic acid or HA) into smaller molecular weight fragments. Exemplary of hyaluronan degrading enzymes are hyaluronidases, and particular chondroitinases and lyases that have the ability to depolymerize hyaluronan. Exemplary chondroitinases that are hyaluronan degrading enzymes include, but are not limited to, chondroitin ABC lyase (also known as chondroitinase ABC), chondroitin AC lyase (also known as chondroitin sulfate lyase or chondroitin sulfate eliminase) and chondroitin C lyase. Chondroitin ABC lyase comprises two enzymes, chondroitin-sulfate-ABC endolyase (EC 4.2.2.20) and chondroitin-sulfate-ABC exolyase (EC 4.2.2.21). Exemplary chondroitin-sulfate-ABC endolyases and chondroitin-sulfate-ABC exolyases include, but are not limited to, those from Proteus vulgaris and Flavobacterium heparinum (the Proteus vulgaris chondroitin-sulfate-ABC endolyase is set forth in SEQ ID NO:305; Sato et al. (1994) Appl. Microbiol. Biotechnol. 41(1):39-46). Exemplary chondroitinase AC enzymes from the bacteria include, but are not limited to, those from Flavobacterium heparinum Victivallis vadensis, set forth in SEQ ID NO:308, and Arthrobacter aurescens (Tkalec et al. (2000) Applied and Environmental Microbiology 66(1):29-35; Ernst et al. (1995) Critical Reviews in Biochemistry and Molecular Biology 30(5):387-444). Exemplary chondroitinase C enzymes from the bacteria include, but are not limited to, those from Streptococcus and Flavobacterium (Hibi et al. (1989) FEMS-Microbiol-Lett. 48(2):121-4; Michelacci et al. (1976) J. Biol. Chem. 251:1154-8; Tsuda et al. (1999) Eur. J. Biochem. 262:127-133).

[0072] As used herein, hyaluronidase refers to an enzyme that degrades hyaluronic acid. Hyaluronidases include bacterial hyaluronidases (EC 4.2.99.1), hyaluronidases from leeches, other parasites, and crustaceans (EC 3.2.1.36), and mammalian-type hyaluronidases (EC 3.2.1.35). Hyaluronidases also include any of non-human origin including, but not limited to, murine, canine, feline, leporine, avian, bovine, ovine, porcine, equine, piscine, ranine, bacterial, and any from leeches, other parasites, and crustaceans. Exemplary non-human hyaluronidases include any set forth in any of SEQ ID NOS: 237-260. Exemplary human hyaluronidases include HYAL1 (SEQ ID NO:262), HYAL2 (SEQ ID NO:263), HYAL3 (SEQ ID NO:264), HYAL4 (SEQ ID NO:265), and PH20 (SEQ ID NO:232). Also included amongst hyaluronidases are soluble human PH20 and soluble rHuPH20.

[0073] Reference to hyaluronidases includes precursor hyaluronidase polypeptides and mature hyaluronidase polypeptides (such as those in which a signal sequence has been removed), truncated forms thereof that have activity, and includes allelic variants and species variants, variants encoded by splice variants, and other variants, including polypeptides that have at least 40%, 45%, 50%, 55%, 65%, 70%, 75%, 80%, 85%, 90%, 95%, 96%, 97%, 98%, 99% or more sequence identity to the precursor polypeptide set forth any of SEQ ID NO:232 or the mature form thereof. Hyaluronidases also include those that contain chemical or posttranslational modifications and those that do not contain chemical or posttranslational modifications. Such modifications include, but are not limited to, pegylation, albumination, glycosylation, farnysylation, carboxylation, hydroxylation, phosphorylation, and other polypeptide modifications known in the art.

[0074] As used herein, soluble human PH20 or sHuPH20 include mature polypeptides lacking all or a portion of the glycosylphospatidylinositol (GPI) attachment site at the C-terminus such that upon expression, the polypeptides are soluble. Exemplary sHuPH20 polypeptides include mature polypeptides having an amino acid sequence set forth in any one of SEQ ID NOS:226-231. The precursor polypeptides for such exemplary sHuPH20 polypeptides include an amino acid signal sequence. Exemplary of a precursor is set forth in SEQ ID NOS:225, which contains a 35 amino acid signal sequence at amino acid positions 1-35. Soluble HuPH20 polypeptides can be degraded during or after the production and purification methods described herein.

[0075] As used herein, soluble rHuPH20 refers to a soluble form of human PH20 that is recombinantly expressed in Chinese Hamster Ovary (CHO) cells. Soluble rHuPH20 is encoded by nucleic acid encoding amino acids 1-482 set forth in SEQ ID NO:225. Also included are DNA molecules that are allelic variants thereof and other soluble variants. The nucleic acid encoding soluble rHuPH20 is expressed in CHO cells which secrete the mature polypeptide. As produced in the culture medium there is heterogeneity at the C-terminus so that the product includes a mixture of species of SEQ ID NOS:226-231. Corresponding allelic variants and other variants also are included. Other variants can have 60%, 70%, 80%, 85%, 90%, 91%, 92%, 93%, 94%, 95%, 96%, 97%, 98%, 99% or more sequence identity with any of SEQ ID NOS:226-231 as long they retain a hyaluronidase activity and are soluble.

[0076] As used herein, hyaluronidase activity refers to any activity exhibited by a hyaluronidase polypeptide. Such activities can be tested in vitro and/or in vivo and include, but are not limited to, enzymatic activity, such as to effect cleavage of hyaluronic acid, ability to act as a dispersing or spreading agent and antigenicity. Exemplary assays include the microturbidity assay (see e.g. Example 16) that measures cleavage of hyaluronic acid by hyaluronidase indirectly by detecting the insoluble precipitate formed when the uncleaved hyaluronic acid binds with serum albumin.

[0077] As used herein, the residues of naturally occurring α-amino acids are the residues of those 20 α-amino acids found in nature which are incorporated into protein by the specific recognition of the charged tRNA molecule with its cognate mRNA codon in humans.

[0078] As used herein, nucleic acids include DNA, RNA and analogs thereof, including peptide nucleic acids (PNA) and mixtures thereof. Nucleic acids can be single or double-stranded. When referring to probes or primers, which are optionally labeled, such as with a detectable label, such as a fluorescent or radiolabel, single-stranded molecules are contemplated. Such molecules are typically of a length such that their target is statistically unique or of low copy number (typically less than 5, generally less than 3) for probing or priming a library. Generally a probe or primer contains at least 14, 16 or 30 contiguous nucleotides of sequence complementary to or identical to a gene of interest. Probes and primers can be 10, 20, 30, 50, 100 or more nucleic acids long.

[0079] As used herein, a peptide refers to a polypeptide that is from 2 to 40 amino acids in length.

[0080] As used herein, the amino acids which occur in the various sequences of amino acids provided herein are identified according to their known, three-letter or one-letter abbreviations (Table 1). The nucleotides which occur in the various nucleic acid fragments are designated with the standard single-letter designations used routinely in the art.

[0081] As used herein, an “amino acid” is an organic compound containing an amino group and a carboxylic acid group. A polypeptide contains two or more amino acids. For purposes herein, amino acids include the twenty naturally-occurring amino acids, non-natural amino acids and amino acid analogs (i.e., amino acids wherein the α-carbon has a side chain).

[0082] As used herein, “amino acid residue” refers to an amino acid formed upon chemical digestion (hydrolysis) of a polypeptide at its peptide linkages. The amino acid residues described herein are presumed to be in the “L” isomeric form. Residues in the “D” isomeric form, which are so designated, can be substituted for any L-amino acid residue as long as the desired functional property is retained by the polypeptide. NH₂ refers to the free amino group present at the amino terminus of a polypeptide. COOH refers to the free carboxy group present at the carboxyl terminus of a polypeptide. In keeping with standard polypeptide nomenclature described in J. Biol. Chem., 243:3552-3559 (1969), and adopted 37 C.F.R. §§ 1.821-1.822, abbreviations for amino acid residues are shown in Table 1:

TABLE 1
Table of Correspondence

SYMBOL

| 1-Letter | 3-Letter | AMINO ACID |
|---|---|---|
| Y | Tyr | Tyrosine |
| G | Gly | Glycine |
| F | Phe | Phenylalanine |
| M | Met | Methionine |
| A | Ala | Alanine |
| S | Ser | Serine |
| I | Ile | Isoleucine |
| L | Leu | Leucine |
| T | Thr | Threonine |
| V | Val | Valine |
| P | Pro | Proline |
| K | Lys | Lysine |
| H | His | Histidine |
| Q | Gln | Glutamine |
| E | Glu | Glutamic Acid |
| Z | Glx | Glu and/or Gln |
| W | Trp | Tryptophan |
| R | Arg | Arginine |
| D | Asp | Aspartic Acid |
| N | Asn | Asparagine |
| B | Asx | Asn and/or Asp |
| C | Cys | Cysteine |
| X | Xaa | Unknown or other |

[0083] It should be noted that all amino acid residue sequences represented herein by formulae have a left to right orientation in the conventional direction of amino-terminus to carboxyl-terminus. In addition, the phrase “amino acid residue” is broadly defined to include the amino acids listed in the Table of Correspondence (Table 1) and modified and unusual amino acids, such as those referred to in 37 C.F.R. §§ 1.821-1.822, and incorporated herein by reference. Furthermore, it should be noted that a dash at the beginning or end of an amino acid residue sequence indicates a peptide bond to a further sequence of one or more amino acid residues, to an amino-terminal group such as NH₂ or to a carboxyl-terminal group such as COOH.

[0084] As used herein, “naturally occurring amino acids” refer to the 20 L-amino acids that occur in polypeptides.

[0085] As used herein, “non-natural amino acid” refers to an organic compound that has a structure similar to a natural amino acid but has been modified structurally to mimic the structure and reactivity of a natural amino acid. Non-naturally occurring amino acids thus include, for example, amino acids or analogs of amino acids other than the 20 naturally-occurring amino acids and include, but are not limited to, the D-isostereomers of amino acids. Exemplary non-natural amino acids are described herein and are known to those of skill in the art.

[0086] As used herein, a DNA construct is a single or double stranded, linear or circular DNA molecule that contains segments of DNA combined and juxtaposed in a manner not found in nature. DNA constructs exist as a result of human manipulation, and include clones and other copies of manipulated molecules.

[0087] As used herein, a DNA segment is a portion of a larger DNA molecule having specified attributes. For example, a DNA segment encoding a specified polypeptide is a portion of a longer DNA molecule, such as a plasmid or plasmid fragment, which, when read from the 5′ to 3′ direction, encodes the sequence of amino acids of the specified polypeptide.

[0088] As used herein, the term polynucleotide means a single- or double-stranded polymer of deoxyribonucleotides or ribonucleotide bases read from the 5′ to the 3′ end. Polynucleotides include RNA and DNA, and can be isolated from natural sources, synthesized in vitro, or prepared from a combination of natural and synthetic molecules. The length of a polynucleotide molecule is given herein in terms of nucleotides (abbreviated “nt”) or base pairs (abbreviated “bp”). The term nucleotides is used for single- and double-stranded molecules where the context permits. When the term is applied to double-stranded molecules it is used to denote overall length and will be understood to be equivalent to the term base pairs. It will be recognized by those skilled in the art that the two strands of a double-stranded polynucleotide can differ slightly in length and that the ends thereof can be staggered; thus all nucleotides within a double-stranded polynucleotide molecule can not be paired. Such unpaired ends will, in general, not exceed 20 nucleotides in length.

[0089] As used herein, “similarity” between two proteins or nucleic acids refers to the relatedness between the sequence of amino acids of the proteins or the nucleotide sequences of the nucleic acids. Similarity can be based on the degree of identity and/or homology of sequences of residues and the residues contained therein. Methods for assessing the degree of similarity between proteins or nucleic acids are known to those of skill in the art. For example, in one method of assessing sequence similarity, two amino acid or nucleotide sequences are aligned in a manner that yields a maximal level of identity between the sequences. “Identity” refers to the extent to which the amino acid or nucleotide sequences are invariant. Alignment of amino acid sequences, and to some extent nucleotide sequences, also can take into account conservative differences and/or frequent substitutions in amino acids (or nucleotides). Conservative differences are those that preserve the physico-chemical properties of the residues involved. Alignments can be global (alignment of the compared sequences over the entire length of the sequences and including all residues) or local (the alignment of a portion of the sequences that includes only the most similar region or regions).

[0090] “Identity” per se has an art-recognized meaning and can be calculated using published techniques. (See, e.g.: Computational Molecular Biology, Lesk, A. M., ed., Oxford University Press, New York, 1988; Biocomputing: Informatics and Genome Projects, Smith, D. W., ed., Academic Press, New York, 1993; Computer Analysis of Sequence Data, Part I, Griffin, A. M., and Griffin, H. G., eds., Humana Press, New Jersey, 1994; Sequence Analysis in Molecular Biology, von Heinje, G., Academic Press, 1987; and Sequence Analysis Primer, Gribskov, M. and Devereux, J., eds., M Stockton Press, New York, 1991). While there exists a number of methods to measure identity between two polynucleotide or polypeptides, the term “identity” is well known to skilled artisans (Carillo, H. & Lipton, D., SIAM J Applied Math 48:1073 (1988)).

[0091] As used herein, homologous (with respect to nucleic acid and/or amino acid sequences) means about greater than or equal to 25% sequence homology, typically greater than or equal to 25%, 40%, 50%, 60%, 70%, 80%, 85%, 90% or 95% sequence homology; the precise percentage can be specified if necessary. For purposes herein the terms “homology” and “identity” are often used interchangeably, unless otherwise indicated. In general, for determination of the percentage homology or identity, sequences are aligned so that the highest order match is obtained (see, e.g.: Computational Molecular Biology, Lesk, A. M., ed., Oxford University Press, New York, 1988; Biocomputing: Informatics and Genome Projects, Smith, D. W., ed., Academic Press, New York, 1993; Computer Analysis of Sequence Data, Part I, Griffin, A. M., and Griffin, H. G., eds., Humana Press, New Jersey, 1994; Sequence Analysis in Molecular Biology, von Heinje, G., Academic Press, 1987; and Sequence Analysis Primer, Gribskov, M. and Devereux, J., eds., M Stockton Press, New York, 1991; Carillo et al. (1988) SIAM J Applied Math 48:1073). By sequence homology, the number of conserved amino acids is determined by standard alignment algorithms programs, and can be used with default gap penalties established by each supplier. Substantially homologous nucleic acid molecules would hybridize typically at moderate stringency or at high stringency all along the length of the nucleic acid of interest. Also contemplated are nucleic acid molecules that contain degenerate codons in place of codons in the hybridizing nucleic acid molecule.

[0092] Whether any two molecules have nucleotide sequences or amino acid sequences that are at least 60%, 70%, 80%, 85%, 90%, 95%, 96%, 97%, 98% or 99% “identical” or “homologous” can be determined using known computer algorithms such as the “FASTA” program, using for example, the default parameters as in Pearson et al. (1988) Proc. Natl. Acad. Sci. USA 85:2444 (other programs include the GCG program package (Devereux, J., et al., Nucleic Acids Research 12(I):387 (1984)), BLASTP, BLASTN, FASTA (Atschul, S. F., et al., J Molec Biol 215:403 (1990)); Guide to Huge Computers, Martin J. Bishop, ed., Academic Press, San Diego, 1994, and Carillo et al. (1988) SIAM J Applied Math 48:1073). For example, the BLAST function of the National Center for Biotechnology Information database can be used to determine identity. Other commercially or publicly available programs include, DNAStar “MegAlign” program (Madison, Wis.) and the University of Wisconsin Genetics Computer Group (UWG) “Gap” program (Madison Wis.). Percent homology or identity of proteins and/or nucleic acid molecules can be determined, for example, by comparing sequence information using a GAP computer program (e.g., Needleman et al. (1970) J. Mol. Biol. 48:443, as revised by Smith and Waterman ((1981) Adv. Appl. Math. 2:482). Briefly, the GAP program defines simi-larity as the number of aligned symbols (i.e., nucleotides or amino acids), which are similar, divided by the total number of symbols in the shorter of the two sequences. Default parameters for the GAP program can include: (1) a unary comparison matrix (containing a value of 1 for identities and 0 for non-identities) and the weighted comparison matrix of Gribskov et al. (1986) Nucl. Acids Res. 14:6745, as described by Schwartz and Dayhoff, eds., ATLAS OF PROTEIN SEQUENCE AND STRUCTURE, National Biomedical Research Foundation, pp. 353-358 (1979); (2) a penalty of 3.0 for each gap and an additional 0.10 penalty for each symbol in each gap; and (3) no penalty for end gaps.

[0093] Therefore, as used herein, the term “identity” or “homology” represents a comparison between a test and a reference polypeptide or polynucleotide. As used herein, the term at least “90% identical to” refers to percent identities from 90 to 99.99 relative to the reference nucleic acid or amino acid sequence of the polypeptide. Identity at a level of 90% or more is indicative of the fact that, assuming for exemplification purposes a test and reference polypeptide length of 100 amino acids are compared, no more than 10% (i.e., 10 out of 100) of the amino acids in the test polypeptide differs from that of the reference polypeptide. Similar comparisons can be made between test and reference polynucleotides. Such differences can be represented as point mutations randomly distributed over the entire length of a polypeptide or they can be clustered in one or more locations of varying length up to the maximum allowable, e.g. 10/100 amino acid difference (approximately 90% identity). Differences are defined as nucleic acid or amino acid substitutions, insertions or deletions. At the level of homologies or identities above about 85-90%, the result should be independent of the program and gap parameters set; such high levels of identity can be assessed readily, often by manual alignment without relying on software.

[0094] As used herein, an aligned sequence refers to the use of homology (similarity and/or identity) to align corresponding positions in a sequence of nucleotides or amino acids. Typically, two or more sequences that are related by 50% or more identity are aligned. An aligned set of sequences refers to 2 or more sequences that are aligned at corresponding positions and can include aligning sequences derived from RNAs, such as ESTs and other cDNAs, aligned with genomic DNA sequence.

[0095] As used herein, “primer” refers to a nucleic acid molecule that can act as a point of initiation of template-directed DNA synthesis under appropriate conditions (e.g., in the presence of four different nucleoside triphosphates and a polymerization agent, such as DNA polymerase, RNA polymerase or reverse transcriptase) in an appropriate buffer and at a suitable temperature. It will be appreciated that a certain nucleic acid molecules can serve as a “probe” and as a “primer.” A primer, however, has a 3′ hydroxyl group for extension. A primer can be used in a variety of methods, including, for example, polymerase chain reaction (PCR), reverse-transcriptase (RT)-PCR, RNA PCR, LCR, multiplex PCR, panhandle PCR, capture PCR, expression PCR, 3′ and 5′ RACE, in situ PCR, ligation-mediated PCR and other amplification protocols.

[0096] As used herein, “primer pair” refers to a set of primers that includes a 5′ (upstream) primer that hybridizes with the 5′ end of a sequence to be amplified (e.g. by PCR) and a 3′ (downstream) primer that hybridizes with the complement of the 3′ end of the sequence to be amplified.

[0097] As used herein, “specifically hybridizes” refers to annealing, by complementary base-pairing, of a nucleic acid molecule (e.g. an oligonucleotide) to a target nucleic acid molecule. Those of skill in the art are familiar with in vitro and in vivo parameters that affect specific hybridization, such as length and composition of the particular molecule. Parameters particularly relevant to in vitro hybridization further include annealing and washing temperature, buffer composition and salt concentration. Exemplary washing conditions for removing non-specifically bound nucleic acid molecules at high stringency are 0.1×SSPE, 0.1% SDS, 65° C., and at medium stringency are 0.2×SSPE, 0.1% SDS, 50° C. Equivalent stringency conditions are known in the art. The skilled person can readily adjust these parameters to achieve specific hybridization of a nucleic acid molecule to a target nucleic acid molecule appropriate for a particular application. Complementary, when referring to two nucleotide sequences, means that the two sequences of nucleotides are capable of hybridizing, typically with less than 25%, 15% or 5% mismatches between opposed nucleotides. If necessary, the percentage of complementarity will be specified. Typically the two molecules are selected such that they will hybridize under conditions of high stringency.

[0098] As used herein, substantially identical to a product means sufficiently similar so that the property of interest is sufficiently unchanged so that the substantially identical product can be used in place of the product.

[0099] As used herein, it also is understood that the terms “substantially identical” or “similar” varies with the context as understood by those skilled in the relevant art.

[0100] As used herein, an allelic variant or allelic variation references any of two or more alternative forms of a gene occupying the same chromosomal locus. Allelic variation arises naturally through mutation, and can result in phenotypic polymorphism within populations. Gene mutations can be silent (no change in the encoded polypeptide) or can encode polypeptides having altered amino acid sequence. The term “allelic variant” also is used herein to denote a protein encoded by an allelic variant of a gene. Typically the reference form of the gene encodes a wildtype form and/or predominant form of a polypeptide from a population or single reference member of a species. Typically, allelic variants, which include variants between and among species typically have at least 80%, 90% or greater amino acid identity with a wildtype and/or predominant form from the same species; the degree of identity depends upon the gene and whether comparison is interspecies or intraspecies. Generally, intraspecies allelic variants have at least about 80%, 85%, 90% or 95% identity or greater with a wildtype and/or predominant form, including 96%, 97%, 98%, 99% or greater identity with a wildtype and/or predominant form of a polypeptide. Reference to an allelic variant herein generally refers to variations n proteins among members of the same species.

[0101] As used herein, “allele,” which is used interchangeably herein with “allelic variant” refers to alternative forms of a gene or portions thereof. Alleles occupy the same locus or position on homologous chromosomes. When a subject has two identical alleles of a gene, the subject is said to be homozygous for that gene or allele. When a subject has two different alleles of a gene, the subject is said to be heterozygous for the gene. Alleles of a specific gene can differ from each other in a single nucleotide or several nucleotides, and can include substitutions, deletions and insertions of nucleotides. An allele of a gene also can be a form of a gene containing a mutation.

[0102] As used herein, species variants refer to variants in polypeptides among different species, including different mammalian species, such as mouse and human.

[0103] As used herein, a splice variant refers to a variant produced by differential processing of a primary transcript of genomic DNA that results in more than one type of mRNA.

[0104] As used herein, modification is in reference to modification of a sequence of amino acids of a polypeptide or a sequence of nucleotides in a nucleic acid molecule and includes deletions, insertions, and replacements of amino acids and nucleotides, respectively. Methods of modifying a polypeptide are routine to those of skill in the art, such as by using recombinant DNA methodologies.

[0105] As used herein, the term promoter means a portion of a gene containing DNA sequences that provide for the binding of RNA polymerase and initiation of transcription. Promoter sequences are commonly, but not always, found in the 5′ non-coding region of genes.

[0106] As used herein, isolated or purified polypeptide or protein or biologically-active portion thereof is substantially free of cellular material or other contaminating proteins from the cell or tissue from which the protein is derived, or substantially free from chemical precursors or other chemicals when chemically synthesized. Preparations can be determined to be substantially free if they appear free of readily detectable impurities as determined by standard methods of analysis, such as thin layer chromatography (TLC), gel electrophoresis and high performance liquid chromatography (HPLC), used by those of skill in the art to assess such purity, or sufficiently pure such that further purification would not detectably alter the physical and chemical properties, such as enzymatic and biological activities, of the substance. Methods for purification of the compounds to produce substantially chemically pure compounds are known to those of skill in the art. A substantially chemically pure compound, however, can be a mixture of stereoisomers. In such instances, further purification might increase the specific activity of the compound.

[0107] The term substantially free of cellular material includes preparations of proteins in which the protein is separated from cellular components of the cells from which it is isolated or recombinantly produced. In one embodiment, the term substantially free of cellular material includes preparations of enzyme proteins having less that about 30% (by dry weight) of non-enzyme proteins (also referred to herein as a contaminating protein), generally less than about 20% of non-enzyme proteins or 10% of non-enzyme proteins or less that about 5% of non-enzyme proteins. When the enzyme protein is recombinantly produced, it also is substantially free of culture medium, i.e., culture medium represents less than about or at 20%, 10% or 5% of the volume of the enzyme protein preparation.

[0108] As used herein, the term substantially free of chemical precursors or other chemicals includes preparations of enzyme proteins in which the protein is separated from chemical precursors or other chemicals that are involved in the synthesis of the protein. The term includes preparations of enzyme proteins having less than about 30% (by dry weight), 20%, 10%, 5% or less of chemical precursors or non-enzyme chemicals or components.

[0109] As used herein, synthetic, with reference to, for example, a synthetic nucleic acid molecule or a synthetic gene or a synthetic peptide refers to a nucleic acid molecule or polypeptide molecule that is produced by recombinant methods and/or by chemical synthesis methods.

[0110] As used herein, production by recombinant means by using recombinant DNA methods means the use of the well known methods of molecular biology for expressing proteins encoded by cloned DNA.

[0111] As used herein, vector (or plasmid) refers to discrete elements that are used to introduce a heterologous nucleic acid into cells for either expression or replication thereof. The vectors typically remain episomal, but can be designed to effect integration of a gene or portion thereof into a chromosome of the genome. Also contemplated are vectors that are artificial chromosomes, such as yeast artificial chromosomes and mammalian artificial chromosomes. Selection and use of such vehicles are well known to those of skill in the art.

[0112] As used herein, an expression vector includes vectors capable of expressing DNA that is operatively linked with regulatory sequences, such as promoter regions, that are capable of effecting expression of such DNA fragments. Such additional segments can include promoter and terminator sequences, and optionally can include one or more origins of replication, one or more selectable markers, an enhancer, a polyadenylation signal, and the like. Expression vectors are generally derived from plasmid or viral DNA, or can contain elements of both. Thus, an expression vector refers to a recombinant DNA or RNA construct, such as a plasmid, a phage, recombinant virus or other vector that, upon introduction into an appropriate host cell, results in expression of the cloned DNA. Appropriate expression vectors are well known to those of skill in the art and include those that are replicable in eukaryotic cells and/or prokaryotic cells and those that remain episomal or those which integrate into the host cell genome.

[0113] As used herein, vector also includes “virus vectors” or “viral vectors.” Viral vectors are engineered viruses that are operatively linked to exogenous genes to transfer (as vehicles or shuttles) the exogenous genes into cells.

[0114] As used herein, operably or operatively linked when referring to DNA segments means that the segments are arranged so that they function in concert for their intended purposes, e.g., transcription initiates in the promoter and proceeds through the coding segment to the terminator.

[0115] As used herein the term assessing is intended to include quantitative and qualitative determination in the sense of obtaining an absolute value for the activity of a protease, or a domain thereof, present in the sample, and also of obtaining an index, ratio, percentage, visual or other value indicative of the level of the activity. Assessment can be direct or indirect and the chemical species actually detected need not of course be the proteolysis product itself but can for example be a derivative thereof or some further substance. For example, detection of a cleavage product of a complement protein, such as by SDS-PAGE and protein staining with Coomasie blue.

[0116] As used herein, biological activity refers to the in vivo activities of a compound or physiological responses that result upon in vivo administration of a compound, composition or other mixture. Biological activity, thus, encompasses therapeutic effects and pharmaceutical activity of such compounds, compositions and mixtures. Biological activities can be observed in in vitro systems designed to test or use such activities. Thus, for purposes herein a biological activity of a protease is its catalytic activity in which a polypeptide is hydrolyzed.

[0117] As used herein equivalent, when referring to two sequences of nucleic acids, means that the two sequences in question encode the same sequence of amino acids or equivalent proteins. When equivalent is used in referring to two proteins or peptides, it means that the two proteins or peptides have substantially the same amino acid sequence with only amino acid substitutions that do not substantially alter the activity or function of the protein or peptide. When equivalent refers to a property, the property does not need to be present to the same extent (e.g., two peptides can exhibit different rates of the same type of enzymatic activity), but the activities are usually substantially the same.

[0118] As used herein, “modulate” and “modulation” or “alter” refer to a change of an activity of a molecule, such as a protein. Exemplary activities include, but are not limited to, biological activities, such as signal transduction. Modulation can include an increase in the activity (i.e., up-regulation or agonist activity) a decrease in activity (i.e., down-regulation or inhibition) or any other alteration in an activity (such as a change in periodicity, frequency, duration, kinetics or other parameter). Modulation can be context dependent and typically modulation is compared to a designated state, for example, the wildtype protein, the protein in a constitutive state, or the protein as expressed in a designated cell type or condition.

[0119] As used herein, a composition refers to any mixture. It can be a solution, suspension, liquid, powder, paste, aqueous, non-aqueous or any combination thereof.

[0120] As used herein, a combination refers to any association between or among two or more items. The combination can be two or more separate items, such as two compositions or two collections, can be a mixture thereof, such as a single mixture of the two or more items, or any variation thereof. The elements of a combination are generally functionally associated or related.

[0121] As used herein, a kit is a packaged combination that optionally includes other elements, such as additional reagents and instructions for use of the combination or elements thereof. In particular, for purposes herein, a “kit” refers to a combination of an activatable matrix-degrading enzyme provided herein and another item for a purpose including, but not limited to, activation, administration, diagnosis, and assessment of a biological activity or property. Kits optionally include instructions for use.

[0122] As used herein, “disease or disorder” refers to a pathological condition in an organism resulting from cause or condition including, but not limited to, infections, acquired conditions, genetic conditions, and characterized by identifiable symptoms. Diseases and disorders of interest herein are those involving components of the ECM.

[0123] As used herein, an ECM-mediated disease or condition is one where any one or more ECM components is involved in the pathology or etiology. For purposes herein, an ECM-mediated disease or conditions includes those that are caused by an increased deposition or accumulation of one or more ECM component. Such conditions include, but are not limited to, cellulite, Duputyren's syndrome, Peyronie's disease, frozen shoulders, existing scars such as keloids, scleroderma and lymphedema.

[0124] As used herein, “treating” a subject with a disease or condition means that the subject's symptoms are partially or totally alleviated, or remain static following treatment. Hence treatment encompasses prophylaxis, therapy and/or cure. Prophylaxis refers to prevention of a potential disease and/or a prevention of worsening of symptoms or progression of a disease. Treatment also encompasses any pharmaceutical use of a modified interferon and compositions provided herein.

[0125] As used herein, a pharmaceutically effective agent, includes any therapeutic agent or bioactive agents, including, but not limited to, for example, anesthetics, vasoconstrictors, dispersing agents, conventional therapeutic drugs, including small molecule drugs and therapeutic proteins.

[0126] As used herein, treatment means any manner in which the symptoms of a condition, disorder or disease or other indication, are ameliorated or otherwise beneficially altered.

[0127] As used herein therapeutic effect means an effect resulting from treatment of a subject that alters, typically improves or ameliorates the symptoms of a disease or condition or that cures a disease or condition. A therapeutically effective amount refers to the amount of a composition, molecule or compound which results in a therapeutic effect following administration to a subject.

[0128] As used herein, the term “subject” refers to an animal, including a mammal, such as a human being.

[0129] As used herein, a patient refers to a human subject.

[0130] As used herein, amelioration of the symptoms of a particular disease or disorder by a treatment, such as by administration of a pharmaceutical composition or other therapeutic, refers to any lessening, whether permanent or temporary, lasting or transient, of the symptoms that can be attributed to or associated with administration of the composition or therapeutic.

[0131] As used herein, prevention or prophylaxis refers to methods in which the risk of developing disease or condition is reduced.

[0132] As used herein, an effective amount is the quantity of a therapeutic agent necessary for preventing, curing, ameliorating, arresting or partially arresting a symptom of a disease or disorder.

[0133] As used herein, unit dose form refers to physically discrete units suitable for human and animal subjects and packaged individually as is known in the art.

[0134] As used herein, a single dosage formulation refers to a formulation for direct administration.

[0135] As used herein, an “article of manufacture” is a product that is made and sold. As used throughout this application, the term is intended to encompass activatable matrix degrading enzymes contained in articles of packaging.

[0136] As used herein, fluid refers to any composition that can flow. Fluids thus encompass compositions that are in the form of semi-solids, pastes, solutions, aqueous mixtures, gels, lotions, creams and other such compositions.

[0137] As used herein, a cellular extract or lysate refers to a preparation or fraction which is made from a lysed or disrupted cell.

[0138] As used herein, animal includes any animal, such as, but are not limited to primates including humans, gorillas and monkeys; rodents, such as mice and rats; fowl, such as chickens; ruminants, such as goats, cows, deer, sheep; ovine, such as pigs and other animals. Non-human animals exclude humans as the contemplated animal. The enzymes provided herein are from any source, animal, plant, prokaryotic and fungal. Most enzymes are of animal origin, including mammalian origin.

[0139] As used herein, a control refers to a sample that is substantially identical to the test sample, except that it is not treated with a test parameter, or, if it is a plasma sample, it can be from a normal volunteer not affected with the condition of interest. A control also can be an internal control.

[0140] As used herein, the singular forms “a,” “an” and “the” include plural referents unless the context clearly dictates otherwise. Thus, for example, reference to a compound, comprising “an extracellular domain” includes compounds with one or a plurality of extracellular domains.

[0141] As used herein, ranges and amounts can be expressed as “about” a particular value or range. About also includes the exact amount. Hence “about 5 bases” means “about 5 bases” and also “5 bases.”

[0142] As used herein, “optional” or “optionally” means that the subsequently described event or circumstance does or does not occur, and that the description includes instances where said event or circumstance occurs and instances where it does not. For example, an optionally substituted group means that the group is unsubstituted or is substituted.

[0143] As used herein, the abbreviations for any protective groups, amino acids and other compounds, are, unless indicated otherwise, in accord with their common usage, recognized abbreviations, or the IUPAC-IUB Commission on Biochemical Nomenclature (see, (1972) Biochem. 11:1726).

### B. THE EXTRACELLULAR MATRIX

[0144] Provided herein are activatable matrix-degrading enzymes (AMDE) that degrade one or more protein components of the extracellular matrix (ECM) in a time controlled manner. By virtue of such targeting and the temporal in vivo activation, diseases and/or conditions of the ECM can be treated. The activatable matrix-degrading enzyme can degrade any component of the ECM; enzyme selection can depend upon the targeted component and/or the particular disease or condition to be treated.

[0145] The ECM makes up the connective tissue or interstitium that surrounds the spaces outside cells and the vascular and lymphatic system, thereby providing mechanical and structural support with and between different tissues. The complex and dynamic microenvironment of the ECM represents a structural and signaling system within connective tissues, such as the skin. Due to the complex nature of the ECM, it can serve diverse functions such as providing support and anchorage for cells, segregating tissues, regulating intercellular communication, and sequestering cellular growth factors. Defects or changes in the organization, or make-up, of the ECM can contribute to a number of diseases or conditions. For example, changes in the synthesis, degradation and organization of collagen fibers contribute to lipodystrophy (e.g., cellulite) and lymphedema.

[0146] The ECM is composed of fibrous structural proteins, such as collagens, polysaccharides, such as proteoglycans and hyaluronic acid, and adhesion proteins that link components of the matrix to each other and to cells. Some connective tissues, such as tendon and cartilage, are principally made up of ECM. The ECM making up the connective tissue of the skin, however, also is distributed with fibroblasts, blood vessels and other components. The ECM also serves as the space where water and its dissolved constituents move from the blood plasma to the lymphatics. The interstitial fluid is nearly isosmotic with the cytoplasm and is bicarbonate buffered providing an extracellular environment that is at neutral pH.

[0147] 1. Components of the ECM

[0148] The ECM (also called the interstitial matrix) is a complex three-dimensional dynamic structure that contains numerous structural macromolecules including fibrous proteins such as collagens, elastin and fibronection, in which glycosyaminoglycans (GAGs) form a hydrated gel-like substance. The components of the ECM are produced by resident cells, typically fibroblasts or cells of the fibroblast family, and are secreted via exocytosis where they interact with other components of the ECM. It is the variation in the relative amount and the way in which the components organize and form together that give rise to diverse connective tissues such as bone, skin or cornea (Albert et al., “Cell Junctions, Cell Adhesions and the Extracellular Matrix.” Molecular Biology of the Cell. New York: Garland Publishers, 1994. Page 972.)

[0149] a. Collagens

[0150] Collagen is the major structural constituent of connective tissues, such as the skin, and plays a role in the development and maintenance of tissue architecture, tissue strength and cell-cell interactions. Collagens include a family of structurally-related proteins of the ECM that contain one or more domains having the conformation of a collagen triple helix (Van der Rest et al. (1991) FASEB J., 5:2814-2823). Collagens contain a Gly-X-Y repeating structure, which allows collagen chains to twist into a helical structure. Each collagen molecule contains three chains twisted around each other to form a triple helix, designated α1-α3. The triple helix structure provides a high mechanical strength to a collagen molecule. There are at least 27 different types of collagens, which differ in amino acid sequence and chain composition. For example, depending on the type of collagen, the three chains forming the triple helix can be the same or different. Collagens can be homotrimeric (i.e. all three polypeptide chains of the triple helix are made up of the same collagen) or can be heterotypic (i.e. fibrils made of more than one collagen type). Collagens can be divided into several families depending on the structure they form. These include fibrillar collagens (also called interstitial collagens; e.g., Type I, II, III, V and XI) and non-fibrillar collagens such as facit (e.g., Type IX, XII, XIV), short chain (e.g., Type VIII, X), basement membrane (e.g., Type IV), and other collagens (e.g., Type VI, VII, and XIII). Table 2 below sets forth common collagen types and their representative location (Van der Rest et al. (1991) FASEB J., 5:2814-2823); www.collagenlife.com/page_{—}1167323108078.html; www.indstate.edu/theme/mwking/extracellularmatrix.html).

[0151] Among the interstitial collagens, collagen molecules associate to form large fibrils, which have a distinctive banding pattern. The banding pattern results from overlap between adjacent molecules. The strength of collagen fibers is based on a multiplicity of intra- and intermolecular linkages of the collagen fibers that form the dense collagen fiber network of connective tissues. The most common of fibrillar collagens include type I, II and III collagens. Type I collagen is found in most connective tissues such as skin, bone, tendon and cornea, and is a made up of two α1(I) chains and one α2(I) chain ([α1(I)]₂ α2(I)). Type II collagen is homtrimeric ([α1(II)]₃) and is predominantly found in the cartilage. Type III collagen also is homotrimeric ([α1(III)]₃) and is predominantly found in the skin and vessels.

[0152] Not all collagens form fibril networks. For example, the basement membrane type IV collagen is non-fibrous and has non-helical interruptions in the helix, which acts as a hinge giving the molecule greater flexibility. Thus, type IV collagen forms a sheet made by a meshwork of filaments rather than by linear fibrils.

[0153] The most abundant protein of the skin is collagen, which is primarily made up of type I(80-85%) and type III (8-11%) of the total collagen of the skin. Type I collagen associates with type III collagen to form the major collagen fibers of the dermis. The tensile strength of skin is due predominantly to these fibrillar collagen molecules, which assemble into microfibrils in a head-to-tail and staggered side-to-side lateral arrangement. Collagen molecules become cross-linked to adjacent collagen molecules, creating additional strength and stability in collagen fibers. For example, type V collagen also associates with type I/III collagen fibers, and regulates the fibril diameter. Other collagen types in the skin include, for example, type IV, type VI, type VII, type XII, type XIV and type XVII.

TABLE 2
Types of Collagens

| | | |
|---|---|---|
| Type | Molecule Composition | Representative tissue |

Fibrillar Collagens

| | | |
|---|---|---|
| I | [α1(I)]₂ [α2(I)] | Skin, bone, tendon, dentin, |
| | | ligaments, interstitial tissues |
| II | [α1(II)]₃ | Cartilage, vitreous humor |
| III | [α1(III)]₃ | Skin, muscle, blood vessels; |
| | | frequently associated with type I |
| V | [α1(V)][α2(v)][α3(V)] | Similar to Type I, also cell |
| | | cultures, fetal tissues; |
| | | associates with Type I |
| XI | [α1(XI)][α2(XI)][α3(XI)] | Cartilage, intervertebral |
| | | cartilage and bone enamel |

Non-fibrillar collagens

| | | |
|---|---|---|
| IV | [α1(IV)]₂ [α2 (IV)] | Basement membrane |
| VI | [α1(VI)][α2(VI)][α3(VI)] | Most interstitial tissues; |
| | | associates with type I |
| VII | [α1(VII)]₃ | epithelia |
| VIII | [α1(VIII)]₃ | Unknown, some endothelial |
| | | cells |
| IX | [α1(IX)][α2(IX)][α3(IX)] | Cartilage; associates with Type |
| | | II |
| X | [α1(X)]₃ | Heterotrophic and mineralizing |
| | | cartilage |
| XII | [α1(XII)]₃ | Ligaments, tendons and tooth |
| | | enamel; interacts with types I |
| | | and III |

[0154] b. Elastin

[0155] A network of elastic fibers in the ECM provides flexibility to tissues that require resilience to recoil after stretching, such as the skin, arteries and lungs. The main component of elastic fibers is the elastin molecule, which creates cross-links to adjacent elastin molecules. These molecules form a core of elastic fibers and are covered by fibrillin, a large glycoprotein that binds to elastin and is important for the integrity of elastic fibers.

[0156] c. Fibronectin

[0157] Fibronectin is a glycoprotein that exists as a pair of two large subunits joined by a pair of disulfide bonds near the carboxyl termini. Each subunit contains functionally distinct domains specific for other matrix macromolecules and receptors on the surface of cells. For example, distinct domains on fibronectin bind collagen (separate domains for types I, II and III), heparin, fibrin and cell surface receptors such as integrins. Fibronectin is present in both plasma and tissue. In tissue, fibronectin functions to link together different types of ECM molecules and cells. It also contains an important cell-binding domain made up of the three amino acids, Arg-Gly-Asp (RGD), which is recognized by integrin receptors in the plasma membranes of cells. The binding of fibronectin molecules to integrin receptors on cells leads to the stimulation of signaling pathways that promote cell attachment, migration and differentiation. These characteristics allow fibronection to play an important role in cell adhesion and to communicate signals between cells and components of the ECM.

[0158] d. Glycosaminoglycans (GAGs)

[0159] GAGs are unbranched polysaccharide chains made of repeating disaccharide units that are strongly hydrophilic. GAGs are highly negatively charged and therefore attract osmotically active Na⁺, causing large amounts of water to be drawn into their structure to keep the ECM hydrated. GAGs, such as dermatan sulfate, typically contain multiple glycosaminoglycan chains of 70-200 sugars long (formed from repeating disaccharide units) that branch from a linear protein core. This results in GAGs occupying a huge volume relative to their mass and forming gels at very low concentrations. The hydrophilic nature of GAGs causes a swelling pressure, or turgor, which allows the ECM to withstand compression forces.

[0160] In the ECM, GAGs are attached to ECM proteins to form proteoglycans or, in the case of hyaluronic acid (also called hyaluronan), exist as a non-proteoglycan matrix component. Extracellular proteoglycans are large, highly hydrated molecules that help cushion cells in the ECM. Glycosaminoglycans such as hyaluronan contribute to the “ground substance” by creating a barrier to bulk fluid flow through the interstitial collagenous matrix by way of their viscosity and water of hydration. Proteoglycans and non-proteoglycan GAGs associate to form large polymeric complexes in the ECM. They associate with each other, and also with fibrous proteins such as collagen.

[0161] i. Proteoglycans

[0162] There are three main types of GAGs that form proteoglycans of the ECM, including dermatan sulfate and chondroitin sulfate, heparin and heparan sulfate, and keratan sulfate. Generally, a proteoglycan is 95% carbohydrate by weight, typically in the form of long unbranched GAG chains. Besides providing hydrated space around cells, proteoglycans also regulate traffic of molecules and cells, bind signaling molecules thereby playing a role in cell activation, and bind other secreted proteins such as proteases and protease inhibitors to regulate the activities of secreted proteins (Albert et al., “Cell Junctions, Cell Adhesions and the Extracellular Matrix.” Molecular Biology of the Cell. New York: Garland Publishers, 1994. pp. 972-978.) For example, the heparin sulfate chains of proteoglycans bind to several different growth factors, including fibroblast growth factors (FGFs), helping them to bind to their specific cell surface receptors.

[0163] Aggrecan is a proteoglycan, which principally contains chondroitin sulfate and heparan sulfate GAGs, and is typically found in cartilage forming large aggregates with hyaluronan to provide mechanical support. Decorin is another exemplary GAG of connective tissues made up primarily of chondroitin sulfate and dermatan sulfate GAGs. It binds to type I collagen fibrils. Perlecan and betaglycan are other exemplary proteoglycans of the ECM. Not all proteoglycans are associated with the ECM: for example, serglycin is associated with secretory vesicles where it helps to package and store secretory molecules, and syndecans are found on the cell surface and act as co-receptors (Albert et al., “Cell Junctions, Cell Adhesions and the Extracellular Matrix.” Molecular Biology of the Cell. New York: Garland Publishers, 1994. pp. 972-978.)

[0164] Heparan sulfate proteoglycans (HSPGs) are ubiquitous macromolecules associated with the cell surface and extracellular matrix (ECM) of a wide range of cells of vertebrate and invertebrate tissues (Wight, T. N., Kinsella, M. G., and Qwamstromm, E. E. (1992) Curr. Opin. Cell Biol., 4, 793-801; Jackson, R. L., Busch, S. J., and Cardin, A. L. (1991) Physiol. Rev., 71, 481-539; Wight, T. N. (1989) Arteriosclerosis, 9, 1-20; Kjellen, L., and Lindahl, U. (1991) Annu. Rev. Biochem., 60, 443-475; and Ruoslahti, E., and Yamaguchi, Y. (1991) Cell, 64, 867-869). The basic HSPG structure consists of a protein core to which several linear heparan sulfate chains are covalently attached. The polysaccharide chains are typically composed of repeating hexuronic and D-glucosamine disaccharide units that are substituted to a varying extent with N- and O-linked sulfate moieties and N-linked acetyl groups. Studies on the involvement of ECM molecules in cell attachment, growth and differentiation revealed a central role of HSPGs in embryonic morphogenesis, angiogenesis, metastasis, neurite outgrowth and tissue repair. The heparan sulfate (HS) chains, which are unique in their ability to bind a multitude of proteins, ensure that a wide variety of effector molecules cling to the cell surface. HSPGs are also prominent components of blood vessels. In large vessels they are concentrated mostly in the intima and inner media, whereas in capillaries they are found mainly in the subendothelial basement membrane where they support proliferating and migrating endothelial cells and stabilize the structure of the capillary wall. The ability of HSPGs to interact with ECM macromolecules such as collagen, laminin and fibronectin, and with different attachment sites on plasma membranes suggests a key role for this proteoglycan in the self-assembly and insolubility of ECM components, as well as in cell adhesion and locomotion.

[0165] ii. Hyaluronic Acid

[0166] Hyaluronic acid (HA; also called hyaluronan) is a large GAG that attracts water, and when bound to water exists in a viscous, gel-like form. Thus, HA serves as a lubricant, holding together gel-like connective tissues. HA is a polymer of disaccharides (sometimes as many as 25,000 repeats in length) and is composed of repeating units of two modified simple sugars: glucuronic acid and N-acetyl glucosamine. HA is part of the ECM of many connective tissues. HA is found in the greatest amount in the skin with almost 50% of the body's HA found in the skin. The HA provides continuous moisture to the skin by binding up water. Decreased production of HA, such as by age, results in wrinkled and unhealthy skin.

[0167] HA, principally through its receptor CD44, also functions to regulate cell behavior during embryonic development and morphogenesis, wound healing, repair and regeneration, inflammation and tumor progression and invasion (Harada et al. (2006) J. Biol. Chem., 8:5597-5607). HA is degraded by hyaluronidases. The degradation products of HA can be found in increased amounts in damaged or growing tissues, and in a variety of inflammatory conditions. HA fragments promote angiogenesis and can stimulate cytokine production by macrophages and dendritic cells in tissue injury and skin transplant.

[0168] 2. Histology of the Skin

[0169] The skin is composed of several distinct layers, principally the epidermis and dermis. The epidermis is a specialized epithelium derived from the ecotoderm, and beneath this is the dermis, which is a derivative of the mesoderm and is a vascular dense connective tissue. These two layers are firmly adherent to one another and form a region which varies in overall thickness form approximately 0.5 to 4 mm in different areas of the body. Beneath the dermis is a layer of loose connective tissue, which varies from areolar to adipose in character. This is referred to as the hypodermis, but is typically considered not to be part of the skin. The dermis is connected to the hypodermis by connect tissue fibers that pass from one layer to the other.

[0170] a. The Epidermis

[0171] The epidermis is the skin layer directly above the dermis, and is the surface layer of the skin. The principle function of the epidermis is to act as a protective barrier against water loss, chemical injury and invading pathogens. The epidermis is a thin layer of approximately fifteen cell layers that is about 0.1 to 1.5 millimeters thick composed primarily of keratinocytes (Inlander, Skin, New York, N.Y.: People's Medical Society, 1-7 (1998)). The epidermis is itself divided into several layers (e.g., stratum basale, stratum spinosum, stratum granulosum, stratum lucidum, stratum corneum) based on the state of differentiation of the keratinocytes. Keratinocytes originate in the basal layer from keratinocyte stem cells. As the keratinocytes grow and divide, they undergo gradual differentiation eventually reaching the stratum corneum where they form a layer of enucleated, flattened, highly keratinized cells called squamous cells (also called comeocytes). Besides being made up of comeocytes, the stratum corneum also contains sebum. The sebum is secreted by sebaceous glands, which are usually found in hair-covered areas connected to hair follicles. Sebum is a slightly acid layer that helps to hold the comeocytes together and holds moisture in. This acidity is due to the presence of amphoteric amino acids, lactic acid and fatty acids that make up sebum. Thus, the pH of the skin surface is normally between 5 and 6, typically about 5.5. Sebum acts to waterproof hair and skin, and keep them from becoming dry, brittle and cracked, and it also inhibits the growth of microorganisms on skin. The term “acid mantle” refers to the presence of the water-soluble substances on most regions of the skin.

[0172] b. The Dermis

[0173] The connective tissue of the skin is called the dermis. The dermis is 1.5 to 4 milliliters thick. In the skin, the dermis contains ECM components; the main protein components are collagen and elastin. The dermis also is home to most of the skin's structures, including sweat and oil glands that secrete substances through openings in the skill called pores, or comedos, hair follicles, nerve endings, and blood and lymph vessels (Inlander, Skin, New York, N.Y.: People's Medical Society, 1-7 (1998)).

[0174] c. The Hypodermis

[0175] Below the dermis is the hypodermis, which is a fatty layer and is the deepest layer of the skin. It acts both as an insulator for body heat conservation and as a shock absorber for organ protection (Inlander, Skin, New York, N.Y.: People's Medical Society, 1-7 (1998)). In addition, the hypodermis also stores fat for energy reserves.

[0176] 3. Diseases of the ECM

[0177] Certain diseases and conditions result from defects or changes in the architecture of the extracellular matrix due to aberrant expression or production of ECM components. For example, in some inflammatory conditions such as occur upon wound healing, cytokines are secreted, which stimulate fibroblasts to secrete ECM components such as collagen. The ECM components accumulate and become locally deposited, resulting in a wide range of fibrotic conditions. Matrix deposition is a frequent feature in many chronic inflammatory diseases and in other diseases and conditions. Included among these are collagen-mediated disease conditions such as, but not limited to, scars such as keloid and hypertrophic scars, Duputyren's syndrome, Peyronie's disease and lymphedema. Cellulite also is a prominent disease of the ECM that, in addition to increased adipogenicity, is characterized by alterations in the connective tissue matrix resulting in an abnormal fibrous septae network of collagen (Rawlings et al. (2006) Int. J. Cos. Science, 28:175-190).

[0178] Diseases and conditions of the ECM that are characterized by aberrant expression or overproduction of matrix components, resulting in their accumulation and unwanted deposition, can be treated by the activatable matrix-degrading enzymes provided herein. By virtue of the temporal activation of such enzymes upon in vivo administration, the treatment of such diseases and conditions is regulated to limit the enzymatic degradation of the matrix components. For example, by limiting the duration of action of matrix degradation, unwanted side effects associated with uncontrolled protein degradation is minimized.

### C. MATRIX-DEGRADING ENZYMES

[0179] Provided herein are compositions, combinations and containers containing activatable matrix-degrading enzymes, and methods of using activatable matrix-degrading enzymes to treat ECM-mediated diseases or conditions. Matrix-degrading enzymes degrade protein components or glycoproteins of the ECM, including, but not limited to, collagen, elastin, fibronectin and proteoglycans. By virtue of their ability to cleave one or more ECM components, activatable matrix-degrading enzymes provided herein can be used to modify the matrix of tissues, particularly those exhibiting structural defects or changes due to excess of one or more ECM protein or unwanted accumulation of fibrous tissue rich in one or more ECM proteins, such as collagen. Thus, such enzymes are useful in treating diseases or conditions in which ECM proteins are involved.

[0180] Among matrix-degrading enzymes are proteases and glycosyl hydrolases. Hence, matrix-degrading enzymes include proteins that are protein-degrading enzymes that recognize sequences of amino acids or a polypeptide substrate within a target protein and also hydrolases that recognize non-peptide bonds such as ester bonds or glycosyl groups. Among proteases are exoproteases of the serine, cysteine, aspartic and metallo-protease families. Upon recognition of the substrate sequence, proteases catalyze the hydrolysis or cleavage of a target protein. Such hydrolysis of a target protein, depending on the location of the peptide bond within the context of the full-length sequence of the target sequence, can inactivate, or in some instances activate, a target.

[0181] Several distinct types of catalytic mechanisms are used by proteases (Barret et al. (1994) Meth. Enzymol. 244:18-61; Barret et al. (1994) Meth. Enzymol 244:461-486; Barret et al. (1994) Meth. Enzymol. 248:105-120; Barret et al. (1994) Meth. Enzymol. 248:183-228). Based on their catalytic mechanism, the proteases that cleave peptide bonds are subdivided into serine-, cysteine-, aspartic-, threonine- and metallo-proteases. Serine-type peptidases have a serine residue involved in the active center, aspartic-type peptidases have two aspartic acids in the catalytic center, cysteine-type peptidases have a cysteine residue, threonine-type peptidases have a threonine residue, and metallo-peptidases use a metal ion in the catalytic mechanism. The catalytic activity of the proteases is required to cleave a target substrate. Serine and metalloproteinases are most active at neutral pH, while cysteine and aspartic proteases, found predominantly in lysosomes, have acidic pH optima. Thus, lysosomal proteases include proteases of the cysteine and aspartic protease families. Other families of enzymes include the hydrolases such as esterases that act on ester bonds and glycolases that hydrolyze O- or S-glycosyl compounds or N-glycosyl compounds. Exemplary of a glycosyl hydrolase is heparanase.

[0182] Exemplary matrix-degrading enzymes are set forth in TABLE 3 (see e.g., Chapman et al., Am J. Physiol Heart Circ. Physiol. (2004) 286: 1-10; Iozzo R V, Proteoglycans: Structure, biology, and Molecular Interactions, CRC Press (2000), pp. 94-96; Owen et al. (1999) J. Leuk. Biol., 65:137-150; Buhling et al. (2004) Eur. Respir. J., 23:620-628; Thomas Kreis and Ronald Cale, Extracellular Matrix, Anchor and Adhesion Proteins, Oxford University Press (1999) pp. 515-523; Ian M. Clark and Gillian Murphy. “Matrix Proteinases,” in Dynamics of Bone and Cartilage Metabolism, Academic Press (2006), pp. 181-198; Buck et al. (1992) Biochem J., 282:273-278). The sequence identifiers (SEQ ID NO) for the nucleotide sequence (mRNA) and encoded amino acid sequence of the precursor polypeptide for each of the exemplary proteases are depicted in the Table. The sequence identifiers (SEQ ID NO) for the amino acid sequence of the proprotein for each of the exemplary proteases also are depicted in the Table, as well as the amino acid positions within the proprotein that correspond to the propeptide. Variations also exist among allelic and species variants and other variants known in the art, and such variants also are contemplated for use as activatable enzymes. The Table also sets forth exemplary ECM target substrates for each enzyme. Reference to such substrates is for reference and exemplification, and are not intended to represent an exhaustive list of all target substrates. One of skill in the art knows or can empirically determine ECM target substrates for a desired enzyme using routine assays, just as any described herein.

[0183] Matrix-degrading enzymes can be produced or isolated by any method known in the art including isolation from natural sources, isolation of recombinantly produced proteins in cells, tissues and organisms and by recombinant methods and by methods including in silico steps, synthetic methods and any methods known to those of skill in the art. Typically, enzymes are produced or isolated in an inactive form. Conditional activation can be achieved as described below.

TABLE 3
Matrix-Degrading Enzymes

| | | | | SEQ ID NO | | |
|---|---|---|---|---|---|---|
| | | Enzyme | | Precursor | | |
| | | databank | | | aa | |
| | | access | | | (aa of signal | |
| | | code | | | sequence(ss); | |
| | | (EC) | GenBank | | aa of propeptide | mature |
| Protease | Substrate | www.expasy.ch/sprot/enzyme.html | No. | nt | (pp) | aa |

Serine Protease

| | | | | | | |
|---|---|---|---|---|---|---|
| Pancreatic | elastin | 3.4.21.36 | Q9UNI1; | 19 | 20 | 21 |
| elastase | | | NM_001971 | | (ss aa 1-8; | |
| (PE1; | | | | | pp aa 9-18) | |
| Elastase-1) | | | | | | |
| Elastase-2A | elastin | 3.4.21.71 | P08217; | 22 | 23 | 24 |
| | | | NM_033440 | | (ss aa 1-16; | |
| | | | | | pp aa 17-28) | |
| Elastase-2B | elastin | 3.4.21.71 | P08218; | 25 | 26 | 27 |
| | | | NM_015849 | | (aa aa 1-16; | |
| | | | | | pp aa 17-28) | |
| Neutrophil | Elastin, | 3.4.21.37 | P08246 | 28 | 29 | 30 |
| elastase (NE; | fibronectin, | | NM_001972 | | (ss aa 1-17; | |
| leukocyte | laminin, | | | | pp aa 28-29) | |
| elastase; | collagen type | | | | | |
| elastase-2) | II, IV, VI, | | | | | |
| | proteoglycans | | | | | |
| Proteinase-3 | elastin, | 3.4.21.76 | P24158 | 31 | 32 | 33 |
| (PR-3; | fibronectin, | | NM_002777 | | (ss aa 1-25; | |
| myeloblastin) | laminin, | | | | pp aa 26-27, | |
| | vitronectin, | | | | 249-256) | |
| | collagen type | | | | | |
| | IV | | | | | |
| Endogenous | elastin | 3.4.21.46 | S73894 | 34 | 35 | 36 |
| vascular | | | (Rattus sp.) | | (ss aa 1-20; | |
| elastase | | | | | pp aa 21-25) | |
| (EVE; tissue | | | | | | |
| elastase; | | | | | | |
| complement | | | | | | |
| factor D) | | | | | | |
| Cathepsin G | collagen type | EC | P08311 | 37 | 38 | 39 |
| | IV, laminin, | 3.4.21.20 | NM_001911 | | (ss aa 1-18; | |
| | fibronectin, | | | | pp aa 19-20) | |
| | proteoglycan, | | | | | |
| | elastin | | | | | |
| Mast cell | collagen type | 3.4.21.39 | P23946 | 40 | 41 | 42 |
| chymase | IV, laminin, | | NM_001836 | | (ss aa 1-19; | |
| | fibronectin, | | | | pp aa 20-21) | |
| | proteoglycan | | | | | |
| Mast cell | fibronectin, | 3.4.21.59 | Q9BZJ3 | 43 | 44 | 45 |
| tryptase | fibrinogen, | | NM_012217 | | (ss aa 1-18; | |
| | collagen type | | | | pp aa 19-30) | |
| | IV, | | | | | |
| | proteoglycan | | | | | |
| Plasmin | Proteoglycan, | 3.4.21.7 | P00747 | 46 | 47 | 48 |
| | fibronectin, | | NM_000301 | | (ss aa 1-19; | |
| | laminin | | | | pp aa 20-97) | |
| Thrombin | proteoglycan | 3.4.21.5 | P00734 | 49 | 50 | 51 |
| | | | NM_000506 | | (ss aa 1-24; | |
| | | | | | pp aa 25-43) | |
| Granzyme B | proteoglycan | 3.4.21.79 | P10144 | 52 | 53 | 54 |
| | | | NM_004131 | | (ss aa 1-18; | |
| | | | | | pp aa 19-20) | |

Cysteine Protease

| Cathepsin S | Elastin, | EC | P25774 | 55 | 56 | 57 |
|---|---|---|---|---|---|---|
| | collagen | 3.4.22.27 | NM_004079 | | (ss 1-16; pp | |
| | | | | | 17-114) | |
| Cathepsin K | elastin, | EC | P43235 | 58 | 59 | 60 |
| | collagen I and | 3.4.22.38 | NM_000396 | | (ss aa 1-15; | |
| | III | | | | pp aa 16-114) | |
| Cathepsin L | elastin, | EC | P07711 | 61 | 62 | 1 |
| | collagen I and | 3.4.22.15 | | | (ss aa 17; pp | |
| | IV | | | | aa 18-113) | |
| Cathepsin B | Collagen IV, | EC | P07858 | 63 | 64 | 65 |
| | laminin, | 3.4.22.1 | NM_001908 | | (ss aa 1-17; | |
| | fibronectin | | | | pp aa 18-79) | |
| Cathepsin C | Proteoglycans | EC | P53634 | 178 | 179 | 180 |
| | (decorin) | 3.4.14.1 | NM_001814 | | (ss aa 1-24; | |
| | | | | | pp aa 135-230) | |
| Cathepsin H | fibronectin | EC | P09668 | 66 | 67 | 68 |
| | | 3.4.22.16 | X16832 | | (ss aa 1-22; | |
| | | | | | pp aa 23-97) | |
| Cathepsin F | Collagen | EC | Q9R013 | 69 | 70 | 71 |
| | fragments | 3.4.22.41 | NM_019861 | | (ss aa 1-19; | |
| | | | (Mus | | pp aa 20-248) | |
| | | | musculus) | | | |
| Cathepsin F | Collagen | EC | Q9UBX1 | 181 | 182 | 183 |
| | fragments | 3.4.22.41 | NM_003793 | | (ss aa 1-19; | |
| | | | | | pp 20-270) | |
| Cathepsin O | fibrinogen | EC | Q8BM88 | 72 | 73 | 74 |
| | | 3.4.22.42 | NM_177662 | | (aa aa 1-23; | |
| | | | (mus | | pp aa 24-98) | |
| | | | musculus) | | | |
| Cathepsin O | fibrinogen | EC | P43234 | 184 | 185 | 186 |
| | | 3.4.22.42 | NM_001334 | | (ss aa 1-23; | |
| | | | | | pp aa 24-107) | |
| Cathepsin R | | EC3.4.22.— | Q9JIA9 | 75 | 76 | 77 |
| | | | NM_020284 | | (ss aa 1-17; | |
| | | | (mus | | pp aa 18-114) | |
| | | | musculus) | | | |
| Cathepsin V | collagen | EC | O60911 | 187 | 188 | 189 |
| (Cathepsin | | 3.4.22.43 | NM_001333 | | (ss aa 1-17; | |
| L2) | | | | | pp aa 18-113) | |
| Cathepsin W | | EC | P56202 | 78 | 79 | 80 |
| | | 3.4.22.— | NM_001335 | | (ss aa 1-21; | |
| | | | | | pp aa 22-127) | |
| Calpain 1 | fibronectin, | EC | Calpain 1 | 81 | | 82 |
| | vitronectin, | 3.4.22.52 | large | | | |
| | proteoglycans | | subunit: | | | |
| | | | P07384 | | | |
| | | | NM_005186 | | | |
| Calpain 2 | fibronectin, | EC3.4.22. | Calpain 2 | 83 | 84 | 85 |
| | vitronectin, | 53 | large | | (aa 1 | |
| | proteoglycans | | subunit: | | initiating | |
| | | | P17655 | | methionine) | |
| | | | NM_001748 | | | |
| | | Calpain small subunit 1 | | 86 | | 87 |
| | | (associates with Calpain | | | | |
| | | 1 and 2 large subunits) | | | | |
| | | P04632 | | | | |
| | | NM_001749 | | | | |
| Legumain | | EC | Q99538 | 190 | 191 | 192 |
| | | 3.4.22.34 | NM_005606 | | (ss aa 1-17; | |
| | | | | | pp aa 324-433) | |
| Cathepsin Z | | EC | Q9UBR2 | 193 | 194 | 195 |
| (cathepsin X) | | 3.4.22.— | NM_001336 | | (ss aa 1-23; | |
| | | | | | pp aa 24-61) | |

Aspartic Protease

| | | | | | | |
|---|---|---|---|---|---|---|
| Cathepsin D | proteoglycan | EC | P07339 | 88 | 89 | 90 |
| | | 3.4.23.5 | NM_001909 | | (ss aa 1-18; | |
| | | | | | pp aa 19-64) | |
| Cathepsin E | proteoglycan | EC | P14091 | 91 | 92 | 93 |
| | | 3.4.23.34 | Isoform a | | (ss aa 1-17; | |
| | | | NM_001910 | | pp aa 18-53) | |
| | | | Isoform b | 94 | 95 | 96 |
| | | | NM_148964 | | (ss aa 1-17; | |
| | | | | | pp aa 18-53) | |

Metallo-Protease

| | | | | | | |
|---|---|---|---|---|---|---|
| MMP-1 | collagen I, II, | 3.4.24.7 | P03956, | 97 | 98 | 99 |
| (collagenase- | III, VII, VIII, | | NM_002421 | | (ss aa 1-19; | |
| 1) | X, XI, gelatin, | | | | pp aa 20-99) | |
| | proteoglycan, | | | | | |
| | fibronectin, | | | | | |
| | glycoprotein | | | | | |
| MMP-8 | collagen I, II, | 3.4.24.34 | P22894 | 100 | 101 | 102 |
| (collagenase- | III, aggrecan | | NM_002424 | | (ss aa 1-20; | |
| 2) | | | | | pp aa 21-100) | |
| MMP-13 | collagen I, II, | 3.4.24.— | P45452 | 103 | 104 | 105 |
| (collagenase- | III, IV, VI, | | NM_002427 | | (ss aa 1-19; | |
| 3) | IX, X, XIV, | | | | pp aa 20-103) | |
| | gelatin, | | | | | |
| | proteoglycan, | | | | | |
| | fibronectin, | | | | | |
| | glycoprotein | | | | | |
| MMP-18 | collagen I | 3.4.24.— | Xenopus | 106 | 107 | 108 |
| (collagenase- | | | laevis | | (ss aa 1-17; | |
| 4) | | | O13065 | | pp aa 18-99) | |
| MMP-2 | gelatins, | 3.4.24.24 | P08253 | 109 | 110 | 111 |
| (gelatinase | collagen I, II, | | NM_004530 | | (ss aa 1-29; | |
| A) | III, IV, V, | | | | pp 30-109) | |
| | VII, X, XI, | | | | | |
| | elastin, | | | | | |
| | fibronectin, | | | | | |
| | laminin, | | | | | |
| | proteoglycan, | | | | | |
| | glycoprotein | | | | | |
| MMP-9 | gelatin, | 3.4.24.35 | P14780 | 112 | 113 | 114 |
| (gelatinase | collagen IV, | | NM_004994 | | (ss aa 1-19; | |
| B) | V, VI, XIV, | | | | pp aa 20-93) | |
| | elastin, | | | | | |
| | laminin, | | | | | |
| | proteglycan, | | | | | |
| | glycoprotein | | | | | |
| MMP-3 | fibronectin, | 3.4.24.17 | P08254 | 115 | 116 | 117 |
| (stromelysin- | elastin, | | NM_002422 | | (ss aa 1-17; | |
| 1) | laminin, | | | | pp aa 18-99) | |
| | gelatin, | | | | | |
| | proteoglycan, | | | | | |
| | glycoprotein, | | | | | |
| | collagen III, | | | | | |
| | IV, V, VII, | | | | | |
| | IX, X, XI | | | | | |
| MMP-10 | collagen III, | 3.4.24.22 | P09238 | 118 | 119 | 120 |
| (stromelysin- | IV, V, elastin, | | NM_002425 | | (ss aa 1-17; | |
| 2) | gelatin, | | | | pp aa 18-98) | |
| | fibronectin, | | | | | |
| | aggrecan | | | | | |
| MMP-11 | Gelatin, | 3.4.24.— | P24347 | 121 | 122 | 123 |
| (stromelysin- | fibronectin, | | X57766 | | (ss aa 1-31; | |
| 3) | laminin, | | | | pp aa 32-97) | |
| | collagen IV | | | | | |
| MMP-7 | fibronectin, | 3.4.24.23 | P09237 | 124 | 125 | 126 |
| (matrilysin) | laminin, | | NM_002423 | | (ss aa 1-17; | |
| | elastin, | | | | pp aa 18-94) | |
| | gelatin, | | | | | |
| | collagen I, IV, | | | | | |
| | proteoglycan, | | | | | |
| | glycoprotein | | | | | |
| MMP-26 | collagen IV, | 3.4.24.— | Q9NRE1 | 127 | 128 | 129 |
| (matrilysin-2) | fibronectin, | | NM_021801 | | (ss aa 1-17; | |
| | gelatin, | | | | pp aa 18-89) | |
| | proteoglycan | | | | | |
| MMP-12 | elastin, | 3.4.24.65 | P39900 | 130 | 131 | 132 |
| (metalloelastase) | fibronectin, | | NM_002426 | | (ss aa 1-16; | |
| | laminin, | | | | pp aa 17-105) | |
| | collagen I, IV, | | | | | |
| | V, gelatin, | | | | | |
| | proteoglycan, | | | | | |
| | glycoprotein | | | | | |
| MMP-14 | Collagen I, II, | 3.4.24.80 | P50281 | 133 | 134 | 135 |
| (MT1-MMP) | III, gelatin, | | NM_004995 | | (ss aa 1-20; | |
| | aggregcan, | | | | pp aa 21-111) | |
| | fibronectin, | | | | | |
| | laminin, | | | | | |
| | proteoglycan, | | | | | |
| | glycoprotein | | | | | |
| MMP-15 | aggregan, | EC | P51511 | 136 | 137 | 138 |
| (MT2-MMP) | fibronectin, | 3.4.24.— | NM_002428 | | (ss aa 1-41; | |
| | laminin, | | | | pp aa 42-131) | |
| | glycoprotein | | | | | |
| MMP-16 | Collagen III, | EC | P51512 | 139 | 140 | 141 |
| (MT3-MMP) | fibronectin, | 3.4.24.— | NM_005941 | | (ss aa 1-31; | |
| | laminin, | | | | pp aa 32-119) | |
| | gelatin, | | | | | |
| | proteoglycan | | | | | |
| MMP-17 | gelatin | EC | Q9ULZ9 | 142 | 143 | 144 |
| (MT4-MMP) | | 3.4.24.— | AB021225 | | (ss aa 1-38; | |
| | | | | | pp aa 39-128) | |
| MMP-24 | fibronectin, | EC | Q9Y5R2 | 309 | 310 | 311 |
| (MT5-MMP) | gelatin, | 3.4.24.— | NM_006690 | | (ss aa 1-52; | |
| Transmembrane | proteoglycan | | | | pp aa 53-155) | |
| MMP-25 | collagen IV, | EC | Q9NPA2 | 312 | 313 | 314 |
| (MT6-MMP) | gelatin, | 3.4.24.— | NM_022468 | | (ss aa 1-21; | |
| GPI anchor | fibronectin, | | | | pp aa 22-107) | |
| | proteoglycan | | | | | |
| MMP-19 | collagen IV, | EC | Q99542 | 145 | 146 | 147 |
| | gelatin, | 3.4.24.— | NM_002429 | | (ss aa 1-18; | |
| | laminin, | | | | pp aa 19-97) | |
| | aggregan, | | | | | |
| | fibronectin, | | | | | |
| | glycoprotein | | | | | |
| MMP-20 | aggrecan | EC | O60882 | 148 | 149 | 150 |
| (enamelysin) | | 3.4.24.— | Y12779 | | (ss aa 1-22; | |
| | | | | | pp aa 23-107) | |
| MMP-x | No substrates | EC | O93470 | 151 | 152 | 153 |
| (MMP-21) | defined | 3.4.24.— | NM_001085816 | | (ss aa 1-22; | |
| (XMMP) | | | (Xenopus) | | pp aa 23-180) | |
| MMP-21 | gelatin | EC | Q8N119 | 315 | 316 | 317 |
| | | 3.4.24.— | NM_147191 | | (ss aa 1-24; | |
| | | | | | pp aa 25-144) | |
| MMP-23 | gelatin | EC | O75900 | 318 | 319 | 320 |
| CA-MMP | | 3.4.24.— | AJ005256 | | | |
| MMP-27 | gelatin | EC | Q9H306 | 321 | 322 | 323 |
| CMMP | | 3.4.24.— | NM_022122 | | (ss aa 1-17; | |
| | | | | | pp aa 18-98) | |
| MMP-28 | | EC | Q9H239 | 324 | 325 | 326 |
| (epilysin) | | 3.4.24.— | NM_024302 | | (ss aa 1-22; | |
| | | | | | pp aa 23-122) | |
| ADAMTS-1 | aggrecan | EC | Q9UHI8 | 157 | 158 | 159 |
| | | 3.4.24. | NM_006988 | | (ss aa 1-49; | |
| | | | | | pp aa 50-252) | |
| ADAMTS-2 | Procollagen I, | EC | O95450 | 160 | 161 | 162 |
| | procollagen II | 3.4.24. | AJ003125 | | (ss aa 1-29; | |
| | | | | | pp aa 30-253) | |
| ADAMTS-3 | Procollagen II | EC | O15072 | 163 | 164 | 165 |
| | | 3.4.24.14 | NM_014243 | | (aa 1-229) | |
| ADAMTS-4 | aggrecan | EC | O75173 | 166 | 167 | 168 |
| (aggrecanase- | | 3.4.24.82 | NM_005099 | | (ss aa 1-51; | |
| 1) | | | | | pp aa 52-212) | |
| ADAMTS-5 | aggrecan | EC | Q9UNA0 | 169 | 170 | 171 |
| (aggrecanase- | | 3.4.24. | NM_007038 | | (ss aa 1-16; | |
| 2) | | | | | pp aa 17-261) | |
| ADAMTS-14 | Procollagen I | EC | Q8WXS8 | 172 | 173 | 174 |
| | | 3.4.24. | Isoform a | | (ss aa 1-22; | |
| | | | NM_139155 | | pp aa 23-252) | |
| | | | Isoform a | 175 | 176 | 177 |
| | | | NM_080722 | | (ss aa 1-22; | |
| | | | | | pp aa 23-252) | |

Other

| | | | | | | |
|---|---|---|---|---|---|---|
| Heparanase | Proteoglycan | EC 3.2.—.— | Q9Y251 | 154 | 155 | 156 |
| | | | AF152376 | | (ss aa 1-35; | |
| | | | | | pp aa 110-157) | |

[0184] 1. Enzyme Activation

[0185] Most proteases are synthesized and secreted as inactive forms and require further processing to become active. Activation is typically achieved by conformational, steric or other changes that reveal the enzymes active site. With the exception of calpains, all protease enzymes are typically synthesized as zymogens. Zymogen activation prevents unwanted protein degradation that could occur if proteases were always present in an active form. Generally, zymogens contain N-terminal portions (or prosegments or proregions) that sterically block the active site of the protease and prevent access of substrates to the active site of the protease. The prosegments of the zymogens range in size from two residues to 150 residues. Upon secretion from a preproenzyme form, the proenzyme (containing the prosegment) is inactive.

[0186] Upon proteolytic removal of the prosegment of the zymogen, either autocatalytically or by other proteases, the active site of the enzyme is exposed resulting in a mature protease, and typically, activation. In some cases, however, additional cofactors also are required for complete activation. For example, pH change triggers the activation of enzymes of the cysteine, aspartic and metalloprotease families. Low pH acts to increase the susceptibility of the prosegment as a substrate during zymogen conversion or causes a conformational change in the prosegment or enzyme (Jerala et al. (1998) J Biol. Chem., 273:11498-11504). Lysosomal enzymes, such as cathepsins of the cysteine and aspartic protease families, require acidic conditions before complete activation is achieved. Besides pH, other cofactors include, but are not limited to, salt concentration, reducing agents such as cysteine, DTT and TCEP, metal ions such as calcium, heat or temperature. Thus, various mechanisms of zymogen conversion exist and vary between protease families (see e.g., Khan et al. (1998) Protein Science, 7:815-836; Khan et al. (1999) PNAS, 96: 10968-10975). For example, zymogen conversion to the active enzyme often occurs as a result of proteolysis by autocatalysis or actions of other proteases, changes in pH, or the involvement of accessory molecules or ions, or a combination or one or more of the above conditions. Further control over the time and location of action often is achieved by protein inhibitors (Stroud et al. (1977) Ann. Rev. Biophys. Bioeng., 6:177-93)

[0187] a. Serine Proteases

[0188] Serine proteases (SPs), which include secreted enzymes and enzymes sequestered in cytoplasmic storage organelles, have a variety of physiological roles, including blood coagulation, wound healing, digestion, immune responses and tumor invasion and metastasis. Many serine proteases degrade components of the extracellular matrix (see Table 2 above). For example, proteases involved in the degradation and remodeling of extracellular matrix (ECM) contribute to tissue remodeling, and are necessary for cancer invasion and metastasis.

[0189] The activity of proteases in the serine protease family is dependent on a set of amino acid residues that form their active site. One of the residues is always a serine; hence their designation as serine proteases. The mechanism of cleavage of a target protein by a serine protease is based on nucleophilic attack of the targeted peptidic bond by a serine. The catalytic serine forms a covalently-attached tetrahedral intermediate with the carbonyl atom of the scissile peptide bond of substrates. In many cases the nucleophilic property of the group is improved by the presence of a histidine, held in a “proton acceptor state” by an aspartate. Aligned side chains of serine, histidine and aspartate build the catalytic triad common to most serine proteases.

[0190] Most serine proteases exist as zymogens in the precursor form, and thus are inactive. In the zymogen form of the protease active site for catalysis is distorted compared to the active enzyme. In fact, serine proteases are the only family of proteases who have conformational differences in the active site between the zymogen and active form of the protease. Thus, the catalytic triad exists in the zymogen, but a distorted loop from the proenzyme partially obstructs the substrate-binding cleft. As a result, the substrate polypeptide cannot bind effectively, and proteolysis does not occur. Only after activation, during which the conformation and structure of the zymogen change and the active site is opened, can proteolysis occur.

[0191] Serine proteases are active at neutral pH. Zymogen conversion occurs following limited proteolysis, such as by highly specific catalytic cleavage by another protease or by auto-activation. For example, the conversion of the inactive prothrombin to the active form of the enzyme (thrombin) is achieved by a highly specific catalytic cleavage of the prosegrnent by another of the clotting enzymes (factor Xa). Other serine proteases use similar mechanisms, but the activation cleavage sites differ and thus serine proteases typically are activated by different convertases.

[0192] Granule-associated serine proteases, including but not limited to, granzymes A and B, cathepsin G, neutrophil elastase, proteinase 3, and mast cell tryptase and chymase require a dual proteolytic event for activation. These enzymes are synthesized as preproenzymes; cleavage of the signal peptide results in a proenzyme zymogen form that is inactive. Granule-associated serine proteases contain a prodipeptide at the N-terminus of the enzyme, and also contain a carboxyl-terminal extension which also must be removed for activation. The prodipeptide prevents folding of the mature enzyme into a catalytically active formation. Activation of the granule-associated serine proteases is achieved by cleavage of both the carboxy-terminal extension and the prodipeptide. Cathepsin C has been implicated in cleavage of the prodipeptide in at least some granule-associated serine proteases (Kummer et al. (1996) J Biol. Chem., 271:9281-9286).

[0193] b. Cysteine Proteases

[0194] Cysteine proteases contain a Cys-His pair in their active site, and their catalytic activation involves a cysteine sulfhydryl group. Deprotonation of the cysteine sulfhydryl by an adjacent histidine residue is followed by nucleophilic attack of the cysteine on the peptide carbonyl carbon. A thioester linking the new carboxy-terminus to the cysteine thiol is an intermediate of the reaction (comparable to the acyl-enzyme intermediate of a serine protease). Cysteine proteases include papain, cathepsin, caspases, and calpains. The mechanisms of activation of these different families of cysteine proteases differ.

[0195] i. Cathepsins

[0196] Papain-like cysteine proteases, including cathepsin, are a family of thiol dependent endo-peptidases related by structural similarity to papain. They form a two-domain protein with the domains labeled R and L (for right and left) and loops from both domains form a substrate recognition cleft. The cathepsins are synthesized as zymogens containing a prosegment; the prosegment acts as an N-terminal inhibitory prosegment. Although there is about 25% sequence identify among the mature enzymes, the prosegments exhibit little sequence similarity. The prosegment functions as a potent inhibitor of the mature enzyme. The prosegment also serves other functions such as playing a role in the folding and stability of the enzyme during synthesis and transport at neutral pH.

[0197] Cathepsins of the cysteine protease family are lysosomal enzymes and thus are optimally active below pH 7 and become inactive above pH 7. Cathepsins are synthesized as inactive precursors (i.e. zymogens), and are activated by proteolytic removal of the prosegment. This results in the generation of single-chain enzymes. Generally, the single chain enzymes can be processed into two chain forms containing a heavy chain and a light chain. Typically, the two chains are held together via noncovalent interactions or via disulfide bridges. Hence, mature cathepsins exist in single-chain or in two-chain form.

[0198] The removal of the prosegment can be facilitated either by activation by other proteases or by autocatalytic activation at acidic pH (Turk et al. (2001) The EMBO Journal, 20:4629-4633). The pH dependence of the zymogen conversion process is regulated by conserved salt bridges in the prosegment (e.g., Asp82p and Arg38p and Glu87p and Arg48p in procathepsin L set forth in SEQ ID NO:62). Disruption of the salt bridges by protonation of the carboxylate groups at the lower pH disrupts the hydrophobic core of the prosegment resulting in dissociation of the prosegment from the active site (Khan et al. (1998) Protein Science, 7:815-836). The residues conferring formation of salt bridges can differ between cathepsins. For example, pro-cathepsin B uses alternative salt-bridge interactions for its pH-dependent zymogen conversion (Coulombe et al. (1996) EMBO J., 15:5492-5503).

[0199] Acidic pH conditions are required for the activity of mature cathepsins; zymogen conversion itself is not sufficient for enzyme activity. In addition to its requirement for activity, the acidic pH also stabilizes the enzyme. Inactivation and destabilization of cathepsins at higher pH conditions is caused by deprotonation of the imidazole moiety of the active site —S⁻/H⁺im-ion pair, and “unzipping” of the structure along the active site groove (Dehrmann et al. (1995) Arch. Biochem. Biophys., 324:93-98). Hence, most cathepsins have optimal activity and stability at an acidic pH. For example, cathepsins B, F, H, K, L and V are optimally active in acidic environments and are only weakly active or not active at neutral pH (Lutgens et al. (2007) The FASEB J., 21: 3029-3041). Some cathepsins, e.g. cathepsin L, lose their activity quickly after incubation at a neutral pH. Some cathepsins maintain their enzymatic activity even after incubation at neutral pH, and thus can degrade matrix proteins under physiological conditions. Cathepsins C and S have been found to have the highest pH stability, while cathepsins K and V display intermediate pH stability. In vitro investigations have shown that cathepsin K can degrade fibril proteins at neutral pH. (Buhling et al. (2004) Eur. Respir. J, 23:620-628).

[0200] Cathepsin L

[0201] Cathepsin L (CatL) is a lysosomal acid cysteine protease that belongs to the papain family. The human cathepsin L gene encodes a 333 amino acid cysteine protease that contains a 17 amino acid signal peptide, a 96-amino acid propeptide and a 220 amino acid mature region. (see SEQ ID NOS:61 and 62 and GenBank Accession No. P07711). Cathepsin L also includes allelic and species variants, and other variants. Exemplary of such variants are any set forth in SEQ ID NOS:208 to 223 and 234. Cathepsin L is synthesized as an inactive proenzyme, and like other proteases, contains a propeptide corresponding to amino acids 18-113 of the sequence of amino acids set forth in SEQ ID NO:62. The propeptide inhibits the proteolytic activity of the enzyme. The propeptide segment also functions to stabilize the proenzyme from the denaturing effects of neutral to alkaline pH (Coulombe et al. (1996) The EMBO J., 15:5492-5503). Cleavage of the propeptide occurs by autoprocessing under acidic conditions resulting in a mature enzyme that is active and has catalytic activity under acidic conditions. The mature cathepsin L (set forth in SEQ ID NO:1) can exist as a single chain form of about 28 kDa and/or as a two-chain form of about 24 and 4 kDa (heavy and light chain, respectively). Allelic and species variants of cathepsin L are known. Exemplary species variants are any set forth in SEQ ID NOS:208-223, including nucleic acids and encoded polypeptide and mature forms thereof lacking the signal sequence and propeptide. Exemplary allelic variants are any set forth in SEQ ID NO:234.

[0202] Cathepsin L is primarily localized to endosomes and lysosomes. The optimal proteolytic capacity of mature cathepsin L is achieved at an acidic pH of about 5.5, and it is inactive at neutral pH (Bohley P et al., “Intracellular Protein Turnover.” in S. Holzer and H. Tschcsche (eds.). Biological Functions of Proteinases, pp. 17-34, Berlin: Springer-Verlag. 1979). The pH optima of cathepsin L can be influenced by ionic strength, and therefore the pH optima differs between buffers (Dehrmann et al. (1995) Arch. Biochem. Biophys., 324: 93-98). Procathepsin L is stable under neutral and slightly alkaline pH, conditions where mature cathepsin L is inactivated (Jerala et al. (1998) J. Biol. Chem., 273:11498-11504). For example, at acidic pH the enzyme is more stable, acts less on itself, but actively catalyzes hydrolysis of protein substrates. At pH closer to neutral or physiologic pH and in the presence of elevated temperature such as 37° C., the enzyme is highly unstable because it prefers itself as a substrate (autocatalysis) versus other protein substrates. A reducing agent, if added to an active cathepsin L, can enchance these activities both at acidic and physiologic pH.

[0203] The activated form of cathepsin L has seven half cysteine residues, which include three disulfide cysteins and 1 free cysteine (the active site Cys 25 that is conserved in the cysteine protease family). The presence of a reduced sulfydryl group (—SH) of the Cys25 is required for activity. Hence, the presence of a reducing agent such as Cysteine or a reduced form of glutathioe can help keep the active site sulfydryl in the reduced state. Alternately, or in addition, the reducing agent can reduce the disulfides and help attain a more favorable protein conformation (secondary and tertiary) that induces better binding and catalysis of in vivo substrates.

[0204] Cathepsin L degrades proteins substrates, including, but not limited to, collagen, IL-8 precursor, neurotransmitter precursor, pro-enkephalin, and immunoglobulin light chain-associated (AL) amyloid deposits and azocasein (Barret & Kirschke (1981) Methods Enzymol., 80:535-561; Mason et al., (1985) Biochem. J., 226:233-241). CatL is rapidly inhibited by Z-Phe-Ala-CHN2.

[0205] ii. Calpain

[0206] Calpain is a Ca²⁺-dependent cytoplasmic cysteine protease that exists in two predominant forms, μ-calpain (calpain 1) and m-calpain (calpain 2). Calpain substrates include cytoskeletal proteins, signal-transducing enzymes, transcriptional regulatory factors and integral membrane proteins. Among ECM components, calpains degrade fibronectin, vitronectin and proteoglycans (Ian M. Clark and Gillian Murphy. “Matrix Proteinases,” in Dynamics of Bone and Cartilage Metabolism, Academic Press (2006), pp. 181-198).

[0207] Calpains exist as inactive heterodimers (and ˜80 kDa and ˜30 kDa subunits), and require Ca²⁺ for autocatalysis. μ-calpain and m-calpain differ in their sensitivity to Ca²⁺ required for activation; μ-calpain is half-maximally activated at low micromolar calcium concentrations, which is about an order of magnitude lower than those concentrations required to activate m-calpain (Meyer et al. (1996) Biochem. J, 314:511-519). Upon activation, both subunits of calpain undergo limited autolysis that removes the N-terminal prosegment and increases calcium sensitivity. Autolysis itself is not sufficient to activate calpain because the autolyzed protease still requires calcium to cleave substrate (Meyer et al. (1996) Biochem. J, 314:511-519). Thus, sustained activation of calpain requires the presence of calcium. The calcium requirements are considerably higher than physiological Ca²⁺ concentrations, which is generally 1 μM. For example, in vitro μ-calpain requires a calcium concentration of 10-50 μM and m-calpain requires a calcium concentration of 300-500 μM (Hosfield et al. (1999) The EMBO J., 18:6880-6889). Due to the calcium requirement, calpain is regulated by regional calcium fluxes and/or membrane binding (Molinari and Carafoli (1997) J Membr. Biol., 43:543-5.) Calcium likely induces a conformation change to expose the active site of the protease. Calpastatin is a specific cellular inhibitor of calpains.

[0208] c. Aspartic Proteases

[0209] Aspartate proteases include some proteases found in lysosomes that have been shown to degrade ECM components. Included among these are cathepsins D and E. For activity, two aspartate residues participate in acid/base catalysis at the active site. In the initial reaction, one aspartate accepts a proton from an active site H₂O, which attacks the carbonyl carbon of the peptide linkage. Simultaneously, the other aspartate donates a proton to the oxygen of the peptide carbonyl group.

[0210] The zymogen form of aspartate proteases contain a positively charged N-terminal prosegment that interacts with the central portion of the enzyme forming salt-bridges with the negatively charged segment. Due to the positioning of the prosegment and the formation of the salt bridges, substrates are prevented from accessing the active site. Zymogen conversion to an active enzyme occurs by disruption of the salt bridges at low pH. Exposure to low pH results in protonation of the carboxylate side chains of Asp and Glu residues, resulting in destabilization of salt bridges between the prosegment and mature enzyme. Once removed, the prosegment is autocatalytically degraded by the active enzyme. Subsequent hydrolysis of the prosegment ensures that activation is irreversible, and that the released prosegment will not act as a competitive inhibitor of the active enzyme. Further, no other accessory molecules are required for conversion (Khan et al. (1998) Protein Science, 7:815-836). Like cathepsins of the cysteine protease family, however, acidic pH conditions are required for activity and stability of the mature enzymes.

[0211] d. Metalloproteases

[0212] Metalloproteases (also called Zinc proteases) include the digestive enzymes carboxypeptidases, various matrix metalloproteases (MMPs) that are secreted by cells, ADAMs (a disintegrin and metalloprotease domain), ADAMTS (a disintegrin and a metalloproteinase domain with thrombospondin motifs) and lysosomal proteases. These enzymes, including ADAMs and MMPs, have roles in embryonic development, cell growth and proliferation, inflammatory responses, wound repair, multiple sclerosis, arthritis, and cancer progression and metastasis (Manzetti et al., (2003) J of Computer-Aided Mol. Design, 17: 551). Most MMPs (e.g., collagenase) are involved in degradation of the extracellular matrix, for example, during tissue remodeling. For example, many of these enzymes can cleave components of the basement membrane and extracellular matrix.

[0213] Metalloproteases contain a Zn⁺⁺ ion at the active center of the enzyme required for catalytic activity. A zinc binding motif at the active site of a metalloprotease includes two histidine residues whose imidazole side-chains are ligands to the Zn⁺⁺. During catalysis, the Zn⁺⁺ promotes nucleophilic attack on the carbonyl carbon by the oxygen atom of a water molecule at the active site. An active site base (a glutamate residue in carboxypeptidase) facilitates this reaction by extracting a proton from the attacking water molecule. Generally, these enzymes have a common zinc binding motif (HExxHxxGxxH) in their active site, and a conserved methionine turn following the active site. Mutation of any one of the histidines ablates catalytic activity.

[0214] The zymogen form of metalloproteases contains a prosegment of about 80-100 residues in length. In the zymogen form, the residues within the substrate binding site of the mature enzyme and the catalytic Zn⁺⁺ ions are in the same conformational position as in the active form, and do not change upon zymogen conversion. The enzyme is inactive because the prosegment is positioned to block the site, thus preventing access to substrates. Conversion of the zymogen to the active enzyme results from cleavage of the prosegment from the mature enzyme. Multiple mechanisms are capable of initiating cleavage events, including actions by other proteases, heat, mercurial agents (e.g., 4-amino-phenylmercuric acetate), SH-reactive agents, reactive oxygen and detergents (see e.g., Khan et al. (1998) Protein Science, 7:815-836; Okada et al. (1988) Biochem J., 254:731-741; Okada & Nakanashi (1989) FEBS Lett., 249:353-356; Nagase et al. (1990) Biochemistry, 29:5783-5789; Koklitis et al. (1991) Biochem J., 276:217-221; Springman et al. (1990) PNAS, 87:364-8; Murphy et al. (1997) Matrix Biol., 15:511-8).

[0215] e. Heparanase

[0216] Heparanase is a glycosylated enzyme that is involved in the catabolism of certain glycosaminoglycans. It is an endo-β-glucuronidase that cleaves heparan sulfate at specific intrachain sites. Heparanase is a member of the glycosyl hydrolase clan A (GH-A), which share a common catalytic mechanism that involves two conserved acidic residues, a putative proton donor at Glu²²⁵ and a nucleophile at Glu³⁴³ (Hulett et al. (2000) Biochemistry, 39:15659-15667). Interaction of T and B lymphocytes, platelets, granulocytes, macrophages and mast cells with the subendothelial extracellular matrix (ECM) is associated with degradation of heparan sulfate by heparanase activity.

[0217] Human heparanase cDNA encodes a protein that is initially synthesized as a pre-pro-protein with a signal peptide sequence that is removed by signal peptidase upon translocation into the endoplasmic reticulum (ER). The resulting 65 kDa pro-enzyme form is further processed by proteolytic cleavage resulting in excision of an intervening 6 kDa fragment generating an 8 kDa polypeptide and a 50 kDa polypeptide, forming a heterodimer. The sequence of amino acids of the mature heparanase is set forth in SEQ ID NO:156. Heparanase activity and localization is tightly regulated. For example, the enzyme is highly sensitive to changes in local pH, exerting a high enzymatic activity under acidic conditions that exists in the vicinity of tumors and in inflammatory sites with little or no activity at physiological pH. Thus, heparanase-mediated cleavage of the HS scaffold is a pH-dependent process; maximal enzymatic activity is achieved at pH values ranging from 4 to 6.8 (Gilat et al. (1995) J Exp. Med., 181:1929-1934; Goldshmidt et al. (2003) The FASEB J., 17:1015-1025). At physiological pH, heparanase exhibits little activity. The pH-dependence ensures that the structural breakdown of the ECM is confined to more acidic conditions, such as occurs in endosome and at sites of injury or inflammation (McKenzie et al. (2003) Biochem. J, 373:423-435).

### D. ACTIVATABLE MATRIX-DEGRADING ENZYMES (AMDE)

[0218] Matrix-degrading enzymes require zymogen conversion for activation by cleavage of the prosegment to generate a mature enzyme. As discussed above, many matrix-degrading enzymes also require the continued presence of one or more other activating conditions for activity. Exemplary of such activating conditions include, but are not limited to, pH, metal ions, temperature, reducing agents, oxidizing agents and salt concentration. For example, many enzymes require specific pH values or metal ion concentration or salt concentration or the presence of a reducing agent for activity. In one example, lysosomal enzymes require acidic pH conditions for activity. For example, cathepsins of the cysteine and aspartic family of proteases require acidic pH conditions for activity. Heparanase also is a lysosomal enzyme that accumulates in lysosomes for normal processing in the acidic environment. Generally, the acidic environment is provided in the acidic lysosomes where lysosomal proteases are normally localized. Outside of this environment, lysosomal proteases are inactive or less active and require exogenous exposure to acidic pH for activity. In another example, an activating conditions include metal ion concentration. For example, the calpains require sufficient concentration of Ca²⁺ for activity. Activity of such enzymes is reversible in the absence of the activating condition.

[0219] By taking advantage of the requirement for exogenous activating conditions, activatable matrix-degrading enzymes can be made temporally active for a limited duration upon in vivo administration, for example to the ECM. Such activatable matrix-degrading enzymes are active only when exposed to exogenous activating conditions. Since the activating condition is not present at the site of administration and must be applied exogenously, the activating condition will become neutralized or dissipate over time after in vivo administration of an activator supplying the appropriate activating condition. Hence, activation of an AMDE is reversible following in vivo administration as the activator dissipates or is otherwise neutralized. For example, temporal activation of an AMDE can be achieved in the environment of the interstitium of the skin and other tissues by administering the AMDE in the presence of an exogenous activating condition (i.e. an activator) that is not present at the site of administration. Typically, the activating condition is one that is not present in the ECM, prior to administration of an activator providing the activating condition. Thus, exposure of an activatable matrix-degrading enzyme to an activating condition results in enzyme activation for a limited or predetermined time as the activating condition dissipates or is neutralized in the interstitial environment.

[0220] Hence, provided herein are compositions, combinations and containers containing activatable matrix-degrading enzymes that, upon in vivo administration, permit activation of the enzyme for a limited or predetermined period of time during which the enzyme can exert its biological action. By virtue of the reversible activity of the activatable enzymes, the enzymes become deactivated, thereby controlling the duration of the biological action of such enzymes. The activatable matrix-degrading enzymes are provided in combinations and containers with an activator that provides the activating condition. In addition, the activatable matrix-degrading enzyme and activator also can be combined or provided in combination, such as in containers, with other agents such as any one or more of an antisthetic, alpha adrenergic agent or dispersing agent. The activatable matrix-degrading enzymes are provided in a therapeutically effective amount, that when activated, degrade one or more components of the ECM upon administration, such as upon subcutaneous administration. The resulting activatable matrix-degrading enzymes can be used as therapeutics to treat ECM-mediated diseases or conditions.

[0221] Any matrix-degrading enzyme, whether synthetic or isolated from natural sources, such as those set forth in Table 3 or elsewhere herein, allelic or species variants or other variants thereof, or any known to those of skill in the art is intended for use in the compositions, combinations, methods and apparatus provided herein, so long as the enzyme is activatable due to the requirement of an activating condition. The activatable matrix-degrading enzymes are provided in an inactive form either as a zymogen or as an inactive mature polypeptide either in single-chain or two-chain form. For example, cathepsins even in their mature form are inactive and require acidic pH conditions for conformational stability. Activatable matrix-degrading enzymes include lysosomal proteases, such as cathepsins of the cysteine and aspartic family and heparanases. Exemplary activatable matrix-degrading enzymes are any set forth in any of SEQ ID NOS:56, 59, 62, 64, 179, 67, 70, 73, 76, 182, 185, 188, 79, 194, 89, 92, 95 and 155 and mature forms thereof set forth in SEQ ID NOS:57, 60, 1, 65, 180, 68, 71, 74, 77, 183, 186, 189, 80, 195, 90, 93, 96 and 156 or allelic variants or species variants or other variants thereof. One of skill in the art knows or could identify activatable matrix-degrading enzymes. For example, one of skill in the art could use routine assays of enzyme activation, such as any provided herein and known in the art, to assess the requirement of an exogenous activating condition for sustained or reversible activation of any desired enzyme.

[0222] Activatable matrix-degrading enzymes can be modified to alter any one or more properties or activities. For example, altered properties or activities include, but are not limited to, modification that render the enzyme more stable, alter the substrate specificity and/or confer temperature sensitivity to the enzyme. If desired, enzyme stability also can be increased by pegylation or glycosylation of the enzyme. Modification of polypeptides using standard recombinant DNA techniques is routine to one skilled in the art. For purposes herein, modified matrix-degrading enzymes retain one or more activities of the unmodified enzyme and are activatable. Retained activity can be 40%, 50%, 60%, 70%, 80%, 90%, 95% or more activity of the unmodified enzyme.

[0223] In one example, a matrix-degrading enzyme, for example, a cathepsin, can be modified such that its prosegment is not inhibitory. Modifications can be made by amino acid replacement, substitution or insertion within the prosegment itself, or within regions of the active site where the inhibitory interactions occur. Hence, a cathepsin could be provided in a zymogen form where autocatalysis occurs under acidic conditions; the cleaved prosegment of such a modified enzyme would not result in inactivation as occurs for wild-type cathepsins if provided in a zymogen form.

[0224] In another example, an activatable enzyme can be modified to alter its substrate specificity. For example, an enzyme can be modified to have increased specificity for a particular substrate. Thus, for example, cathepsin L, which exhibits substrate specificity for type I and type IV collagen can be modified so that it has increased substrate specificity for type I collagen, and not type IV collagen, and vice versa. Modifications of polypeptides can be achieved by routine molecular biology techniques, and are within the skill of one in the art. Modified enzymes can be tested for their substrate specificity using routine assays for substrate cleavage such as is described herein, or known in the art. For example, substrate cleavage can be assessed on fluorogenic peptides or on purified proteins. Cleavage can be assessed using in vitro or in vivo assays. For example, cleavage can be assessed by incubating the enzyme with the substrate, and then running the mixture on an SDS-PAGE gel. Degradation can be assessed by Western Blot or by using standard protein stains such as Coomasie Blue or Silver Stain reagents.

[0225] In an additional example, a matrix-degrading enzyme can be modified to have temperature sensitivity. For example, matrix-degrading enzymes that are active at physiological temperature (e.g. 37° C.) can be modified and enzymes selected that are active at lower temperatures (e.g., less than 37° C.; e.g. at or about 20° C., 21° C., 22° C., 23° C., 24° C., 25° C., 26° C., 27° C., 28° C., 29° C. or 30° C.), but that are not active at physiological temperature. Hence, such modified enzymes can be used as activatable matrix-degrading enzymes where the activation condition is low temperature. Administration of the enzymes simultaneously, intermittently, or subsequently with an activating condition providing the cold temperature (e.g. cold buffer) results in activation of the enzyme. The activation of the enzyme is temporally controlled as the in vivo temperature returns to the physiological temperature of 37° C.

[0226] 1. Activating Conditions and Methods for Activation of Activatable Matrix-Degrading Enzymes

[0227] Activatable matrix-degrading enzymes are inactive in the absence of an activating condition. Upon in vivo administration, temporal activation of such activatable matrix-degrading enzymes is achieved by exposure (prior to or upon administration subsequently, intermittently or simultaneously) to one or more specific activators that provide an activating condition sufficient for activation of the enzyme. For example, activation can be achieved by exposure of activatable matrix-degrading enzymes to, for example, temperature (e.g. heat or cold), pH, salt, to solutions containing sufficient concentrations of metal ions (e.g., Ca²⁺) for activation, to solutions containing sufficient concentrations of reducing agents or oxidizing agents for activation, or other methods as described herein or known to one of skill in the art. The choice of activator will vary depending upon the choice of enzyme as described herein or known to one of skill in the art. Generally, an amount (e.g. concentration, level or degree) of activator sufficient to generate an active enzyme is used. This amount can be readily determined empirically and is dependent upon the selected enzyme and selected application.

[0228] By virtue of the reversible and conditional activation of activatable enzymes, temporary activation is achieved, thereby regulating the duration of enzymatic action on extracellular matrix (ECM) components. This is an advantage of the present methods such that deleterious side effects associated with unwanted prolonged activation of enzymes can be controlled. Temporary activation is achieved because activatable matrix-degrading enzymes require continuous exposure to activating conditions in order to remain active. Activating conditions are not normally present, endogenously, in sufficient amounts for activation of an enzyme at sites where activatable matrix degrading enzymes are administered in vivo. For example, the skin interstitium has a neutral pH, and thus a low pH activating condition is not normally present. In another example, the physiological level of metal ions, such as calcium, in the skin interstitium, are far lower than the effective amounts required for activation of some enzymes. Thus, deactivation of enzymes can occur upon decreasing exposure of the enzyme to the exogenous activating condition as may occur following in vivo administration of an activatable enzyme where the exogenously supplied activating condition gradually dissipates or is neutralized.

[0229] Thus, activating conditions provided herein are those which are required for activation of an activatable matrix-degrading enzymes, but that are not normally present in sufficient amounts at the site of administration. The requirement for activating conditions for activation of activatable matrix-degrading enzymes permits activation of matrix-degrading enzymes for a limited time, until the activating condition dissipates or is neutralized such that the enzyme becomes inactive or becomes unstable and is degraded. The amount of time an enzyme is active can be for a predetermined time. For example, an activator can be provided containing an amount of activating condition, such as the concentration, effective amount, level or degree, that is chosen such that the enzyme is active for a set time under the environment and conditions it is exposed to upon in vivo administration. In one example, where acidic pH is the activating condition, the buffering capacity of an acidic buffer can be adjusted to modulate the time of its resistance to changes in pH. The predetermined time at which an activator activates a conditionally activatable matrix-degrading enzyme can be determined empirically and is a function of the disease to be treated, the individual treated, the choice of enzyme and the activator. An activatable matrix-degrading enzyme can be active following in vivo administration in the presence of an activator providing an activating condition for at or about 1 minute, 2 minutes, 3 minutes, 4 minutes, 5 minutes, 10 minutes, 20 minutes, 30 minutes, 40 minutes, 50 minutes, 1 hour, 2 hours, 3 hours, 4 hours, 5 hours, 6 hours or more.

[0230] Exemplary activating conditions and activators and methods of temporal activation are described herein below. In view of such description, other embodiments will be apparent to one of skill in the art.

[0231] a. Activating Condition—Acidic pH

[0232] Compositions and methods for conditional activation of matrix-degrading enzymes whose activity is regulated by pH, and use of such enzymes to treat ECM-mediated diseases or conditions are provided herein. Such methods take advantage of proteins having enzymatic activity only at acidic pH, while remaining inactive or becoming unstable and degraded at neutral pH. Such proteins include lysosomal proteases, including, but not limited to, cathepsins of the cysteine and aspartic families, and also heparanase. For example, lysosomes, an acidic intracellular compartment, contain a large variety of hydrolytic enzymes that degrade proteins and other substances internalized by endocytosis. All intralysosomal proteases, for example, cathepsin L, exhibit an acid pH optimum. Exemplary of such proteases are any set forth in any of SEQ ID NOS:57, 60, 1, 65, 180, 68, 71, 74, 77, 183, 186, 189, 80, 195, 90, 93, 96 and 156.

[0233] Methods of using matrix-degrading enzymes that are active only upon exposure to certain pH conditions are used herein to take advantage of pH differentials within the skin. Human epidermal systems maintain a pH gradient within the stratified layers of the skin. The outer layers have been reported to exhibit an average pH of 5.5 (W. P. Smith (1994) Cosmetics and Toiletries, 109:41-48). The pH of successive layers of the epidermis increases with depth, reaching a final pH closer to the physiological range (about pH 7.4) at the dermal layer.

[0234] Hence, it is contemplated herein that activatable matrix-degrading enzymes are employed that exhibit activity at acidic conditions, but are substantially inactive at neutral pH such as exists in the ECM. A substantially inactive enzyme is any exhibiting 10% or less activity of the enzyme at its pH optima, for example, at or about 1%, 2%, 3%, 4%, 5%, 6%, 7%, 8%, 9%, 9.5% or 10% of activity as present at the enzyme's pH optima. One of skill in the art knows or can determine the pH optima of an enzyme and can assess activity differences at varying pH conditions. For example, the pH optima of cathepsin L is or is about 5.5, but can vary within a range of 4.5 to 6 depending on the particular species of cathepsin L, buffer condition or ionic strength. Cathepsin L is substantially inactive at or above pH 7.4 (Dehrmann et al. (1995) Arch. Biochem. Biophys., 324:93-98). In another example, the optimal pH value for the activity of cathepsin D is or is about 3.0 to 4.0, and it is substantially inactive at pH values at or about 6.0 or higher (Rojas-Espinosa et al. (1973) Infection and Immunity, 8:1000-1008). Cathepsin S is one of the few lysosomal proteases that is stable at pH 7.0 (Bromme et al. (1993) J Biol. Chem., 268: 4832-4838).

[0235] For purposes herein, an activatable enzyme is active in pH conditions at or about 3, 3.5, 4, 4.5, 5, 5.5, 6 or 6.5, but is substantially inactive at neutral pH. A pH activity profile can be performed on an enzyme, and relative activity assessed, to determine its pH optima under various conditions (Dehrmann et al. (1995) Arch. Biochem. Biophys., 324:93-98). It is understood that pH optima can be different depending on the substrate used, buffer conditions, ionic strength and species of enzyme. Thus, reference to pH optima herein is for exemplification only. One of skill in the art can empirically determine the pH optima of an enzyme under specific conditions. For example, buffer conditions and ionic strengths can be varied to determine an enzymes activity under various pH conditions. Enzyme assays to determine pH-activity profiles can be performed using fluorogenic substrates such as are described herein and known to one of skill in the art. The choice of fluorogenic substrate used will vary between enzymes, and is known to one of skill in the art or can be empirically determined.

[0236] Thus, the ability to conditionally activate matrix-degrading enzymes by administration with an activating condition not normally present at the site of administration permits the temporal regulation of, and alteration of, the physiological parameters of organs and tissues, such as the interstitium, exhibiting a neutral pH. Under normal physiological conditions, the pH of the interstitium is neutral. Thus, activatable matrix-degrading enzymes active at low pH, such as lysosomal enzymes described herein, when present in the interstitium would normally be catalytically inactive because of the neutral pH of the interstitium. When the pH of the interstitium is temporarily rendered acidic, for example by administration of a buffered acid solution, lysosomal enzymes with optimal acidic pH when administered to the interstitium will become activated. When the pH of the intersitium turns back towards neutrality, then the matrix-degrading enzymes with requiring acidic pH become inactivated and cease to exert their enzymatic activity.

[0237] Accordingly, it is contemplated herein that activatable matrix degrading enzymes that are substantially inactive at neutral pH can be administered sub-epidermally under the skin (i.e. by subcutaneous, intradermal or intramuscular administration) where the pH is neutral. Other routes of administration of conditionally activatable matrix-degrading enzymes also are contemplated and can be empirically determined based on the pH optima of the particular enzyme such that the activity of the enzyme becomes reversible due to changes in the pH conditions upon administration. Other routes of administration include, but are not limited to, oral, topical and transdermal routes of administration.

[0238] Since the interstitium of most tissues and organs exhibits a neutral pH, temporary acidification can be achieved by infusing an acidic solution to a tissue or organ interstitium. The acidic buffer is a composition that, when administered, temporarily lowers the pH of the interstitium to less than or about 3.0, 3.5, 4.0, 4.5, 5.0, 5.5, 6.0 or 6.5 such that the activatable matrix-degrading enzyme is active. The acid component of the buffer is susceptible to neutralization by the neutral pH of the interstitium. Acidic buffers are known to one of skill in the art. For purposes herein, the acid component of the buffer can be an organic or inorganic acid. Generally, the solution is a solution of a weak acid. Exemplary acids include, but are not limited to, 2-(N-morpholino)ethanesulfonic acid) (MES), acetic acid, citric acid, succinic acid, lactic acid, maleic acid, glycine-hydrochloric acid, citric phosphate and histidine. The effective pH range of acidic buffers is known, and hence, appropriate buffers can be chosen based on the pH optima of the selected enzyme. Exemplary of acidic buffers include, but are not limited to, acetate, citrate, formate, glycine, malate, MES, phosphate, piperazine, propionate, pyridine and succinate buffer. For example, the effective pH range of MES buffer is 5.5 to 6.7.

[0239] The time period required for neutralization, and subsequent inactivation of the acid activatable matrix-degrading enzyme, depends on the formulation of the acidic buffer. For example, shorter time periods result if the acid and/or buffering agents in the acidic buffer are weak relative to the neutralizing capacity of the interstitium; longer time periods result if a stronger acid is utilized or a stronger buffering agent is employed in the acidic buffer. Hence, the resistance to change in pH is dependent on the buffering capacity of the particular buffer. The higher the ionic strength or concentration of the buffer, the higher the buffer capacity. Thus, in the methods and compositions provided herein, temporal regulation of a matrix-degrading enzyme activated at a given pH can be further controlled by the buffering capacity of the buffer chosen. This is exemplified in Example 7. Determination of desired buffers for given applications is routine and within the level of one of skill in the art.

[0240] Typically, the acidic solution is infused directly to a site where degradation of one or more ECM components is desired, for example, to treat an ECM-mediated disease or condition. The infusion of the activating condition in the form of an acidic solution activator can be performed simultaneously, sequentially or intermittently with administration of an inactive activatable matrix-degrading enzyme. Where administration occurs simultaneously, the activatable matrix-degrading enzyme and buffered acidic solution can be in the same or separate compositions. When in the same composition, the enzyme and buffered acidic solution can be provided in a composition as a mixture. Activation of the enzyme also can be achieved by addition of the acidic solution to a concentrated liquid solution or suspension or lyophilized or powdered form of the enzyme prior to administration. Generally, where a liquid solution or suspension of an activatable matrix-degrading enzyme is provided, it is a solution or suspension that, when exposed to an activator providing the appropriate activating condition, is amenable to activation of the enzyme by the activating condition.

[0241] In addition, in the combinations and methods provided herein, an activator having the activating condition (e.g. a buffered acidic solution) and an activatable matrix-degrading enzyme can be provided and administered in combination with any one or more other agents such as any one or more of an anesthetic, alpha adrenergic receptor agonist or dispersing agent. Exemplary of such agents are discussed herein below in the Section entitled “Combination Therapies.” The other agents can be administered simultaneously, sequentially or intermittently with the activator and/or matrix-degrading enzyme.

[0242] In one example of the methods provided herein, a buffered acid solution is administered into the skin interstitium, or other tissue, where an ECM condition or disease is present. The buffered acidic solution can be chosen based on the pH required for activation of the a matrix-degrading enzyme and the desired buffering capacity to achieve activation of limited duration. For example, cathepsin L is an exemplary enzyme for purposes of treating a collagen-mediated disease, such as, for example cellulite. Accordingly, the acidic buffer would be prepared at the optimum pH of 5.5 for activation of cathepsin L. Exemplary of such an acidic buffer is MES. The buffering capacity of the acidic solution also can be experimentally determined as desired, for example, as set forth in Example 7. Generally, the acidic buffer is administered just prior to or together with the matrix-degrading enzyme. For example, if the matrix-degrading enzyme is provided in lyophilized form, the enzyme can be reconstituted with the acidic buffered solution just prior to administration, and the combination of the enzyme and activator administered together. In the presence of the acidic buffer, the enzyme is activated following in vivo administration. Depending on the buffering capacity of the acidic buffer, the pH of the interstitium will return to neutrality after a limited or predetermined time, thereby reversing the degradative effects of the matrix-degrading enzyme.

[0243] In another example of the methods provided herein, a combination of a anesthetic and vasoconstrictor, for example, lidocaine/epinephrine, is administered prior to administration of the activator and matrix-degrading enzyme. Generally, in the methods, a dispersing agent, such as a hyaluronan degrading enzyme, for example a hyaluronidase, also is administered together with the anesthetic and vasoconstrictor, such as an alpha adrenergic receptor agonist.

[0244] b. Activating Condition—Metal Cation Concentration

[0245] Provided herein are composition, combinations, containers and methods containing activatable matrix-degrading enzymes that require exposure to a suitable metal ion, for example Ca²⁺, Mg²⁺ or Zn²⁺, for activation. Exemplary of such an enzyme is calpain (e.g. large subunit set forth in SEQ ID NO:82 (calpain 1) and SEQ ID NO:85 (calpain 2) and small subunit set forth in SEQ ID NO:87, or allelic or species variants or other variants thereof), which requires Ca²⁺ for activation. The metal ion can be provided in the form of an aqueous composition, for example, as a calcium salt. The inactive enzyme can be provided as a mixture with a metal ion, or can be provided as a separate composition. If provided as a separate composition, such as in the form of a concentrated liquid composition or in lyophilized or powdered form, addition of the metal ion to the enzyme will result in an activated enzyme.

[0246] Generally, activation is achieved by exposing an inactive enzyme to a metal cation, for example Ca²⁺, at a concentration sufficient for activation. Precise amounts can be empirically determined or are known to those of skill in the art. For example, in vitro activation of μ-calpain and m-calpain require 10-50 and 300-500 μM calcium concentrations, respectively (Hosfield et al. (1999) The EMBO J., 18: 6880-6889.) Assays for enzymatic activity can be performed to determine optimal concentrations. Typically, for purposes herein, activatable matrix-degrading enzymes include those that require sufficient concentration of a metal ion for activation at a concentration that exceeds the physiological level of metal ion present in the interstitium. For the case of μ-calpain and m-calpain, the calcium levels required for activation exceed physiological levels (see e.g., U.S. Pat. No. 6,620,592; Hosfield et al. (1999) The EMBO J., 18: 6880-6889.)

[0247] In general, the inactive enzyme is packaged or provided so that there are insufficient metal ions to trigger enzyme activation. Hence, where the inactive enzyme is provided as a composition separate from the metal ion activator, it might be necessary to add ethylenediaminetetraacetic acid (EDTA) or ethylene glycol tetraacetic acid (EGTA) (concentrations from about 5 to about 100 mM or higher depending on the application) to tie up any Ca²⁺ or other metal ion to prevent triggering the activation reaction until desired. The activation reaction then can be triggered by adding Ca²⁺ (or other metal cation) at a concentration sufficient to overcome the effects of the chelator. Precise amounts can be empirically determined.

[0248] Depending on the enzyme, temporary activation can be achieved simply by discontinued exposure to metal ion. For example, sustained activation of calpain requires the presence of calcium. Thus, an inactive form of calpain can be activated by adding Ca²⁺, and the resulting mixture, either in the same or separate compositions, can be administered to the interstitum of an organ or tissue. Upon administration, however, the effective concentration of calcium required for continued activation is no longer available; the resulting active enzyme will ultimately return to its inactive state. In other examples, the temporal regulation of an enzyme requiring a metal ion for activation can be controlled by administration of a metal chelator or other reversing agent.

[0249] c. Activating Condition—Reducing Agent

[0250] Provided herein are composition, combinations, containers and methods containing activatable matrix-degrading enzymes that require exposure to a suitable thiol or non-thiol containing reducing agent, for example, tris(2-carboxyethyl)phosphine (TCEP) or cysteine, for activation. Exemplary of such an enzyme is cathepsin L, which requires reducing agent for activation. The reducing agent can be provided in the form of an aqueous composition, for example, as cysteine. The inactive enzyme can be provided as a mixture with a reducing agent, or can be provided as a separate composition. If provided as a separate composition, such as in the form of a concentrated liquid composition or in lyophilized or powdered form, addition of the reducing agent to the enzyme will result in an activated enzyme. The reducing agent can be added prior to, simultaneously, subsequently or intermittently upon administration of the enzyme.

[0251] Generally, activation is achieved by exposing an inactive enzyme to a reducing agent, for example cysteine, at a concentration sufficient for activation. Precise amounts can be empirically determined or are known to those of skill in the art. For example, in vitro activation of cathepsin L generally requires 1-50 mM cysteine. Assays for enzymatic activity can be performed to determine optimal concentrations. Typically, for purposes herein, activatable matrix-degrading enzymes include those that require sufficient concentration of a reducing agent for activation at a concentration that exceeds the physiological level of reducing agent present in the interstitium.

[0252] In general, the inactive enzyme is packaged or provided so that there is insufficient reducing agent concentration to trigger enzyme activation. The activation reaction then can be triggered by adding cysteine (or other reducing agent) at a concentration sufficient to recover enzyme activity. Precise amounts can be empirically determined.

[0253] Depending on the enzyme, temporary activation can be achieved simply by discontinued exposure to reducing agent. For example, sustained activation of cathepsin L requires the presence of cysteine or TCEP. Thus, an inactive form of cathepsin L free of its prosegment can be activated by adding cysteine, and the resulting mixture, either in the same or separate compositions, can be administered to the interstitium of an organ or tissue. Upon administration, however, the effective concentration of cysteine required for continued activation is no longer available; the resulting active enzyme will ultimately return to its inactive state. In other examples, the temporal regulation of an enzyme requiring a reducing agent for activation can be controlled by administration of a reversing agent such as oxidized glutathione.

[0254] d. Activating Condition—Temperature

[0255] Provided herein are temperature sensitive (ts) enzyme mutants of matrix-degrading enzymes (tsAMDE) that degrade one or more components of the extracellular matrix (ECM) in a temperature-dependent manner. In particular, mutants provided herein degrade a collagen. In some examples, the mutants display higher activity at lower temperatures (e.g. 25° C.) then at higher temperatures, for example, physiologic temperatures (e.g. 37° C.). In other examples, the mutants display higher activity at physiologic temperatures then at lower temperatures. Thus, the activation of the tsAMDE, for example, tsMMPs, upon administration to the body, can be temporally and conditionally controlled by virtue of changes in temperature. Uncontrolled enzyme activity can be highly disruptive to tissue integrity. By virtue of the conditional activation of activatable tsAMDE, temporary activation is achieved, thereby regulating the duration of enzymatic action on extracellular matrix (ECM) components to reduce deleterious side effects associated with unwanted prolonged activation of enzymes. This is an advantage of the present tsAMDE, for example tsMMPs, over existing collagenase treatments for treating ECM-mediated diseases or conditions. Hence, an advantage of such mutants is that their activity can be regulated, thereby permitting the use of tsAMDE to treat diseases and/or conditions of the ECM.

[0256] tsAMDEs mutants, for example tsMMPs, provided herein include those that are modified to be temperature sensitive, for example, by amino acid substitution, insertion or replacement. Generally, tsAMDEs contain one or more amino acid replacements in their primary sequence rendering the protein more active at permissive temperatures then at non-permissive temperatures. tsAMDEs provided herein can contain 1, 2, 3, 4, 5, 6, 7, 8, 9, 10, 11, 12, 13, 14, 15, 16, 17, 18, 19, 20 or more amino acid modifications. In particular, tsAMDEs provided herein contain 1, 2, 3, 4, 5, 6, 7, 8, 9 or 10 amino acids modifications.

[0257] tsAMDEs, for example tsMMPs, provided herein are activatable at a permissive temperature, but are less active or inactive at other non-permissive temperatures. The tsAMDEs provided herein have a ratio of activity at a permissive temperature compared to a non-permissive temperature that is or is about 1.1, 1.2, 1.3, 1.4, 1.5, 1.6, 1.7, 1.8, 1.9, 2.0, 2.5, 3.0, 3.5, 4.0, 4.5, 5, 5.5, 6, 6.5, 7, 7.5, 8, 8.5, 9, 9.5, 10, 15, 20, 30, 40, 50 or more. Thus, the activity of the tsAMDEs provided herein at the non-permissive temperature is or is about 70%, 65%, 60%, 55%, 50%, 45%, 40%, 35%, 30%, 25%, 20%, 15%, 10%, 5%, 4%, 3%, 2%, 1%, 0.5% or less of the activity at a permissive temperature.

[0258] For example, AMDEs that are normally active at physiological temperature (e.g. 37° C.) are modified and enzymes selected that are active at lower temperatures (e.g. less than 37° C.; e.g. at or about 20° C., 21° C., 22° C., 23° C., 24° C., 25° C., 26° C., 27° C., 28° C., 29° C. or 30° C.), but that are less active or inactive at physiologic temperature. Such modified enzymes can be used as activatable matrix-degrading enzymes (AMDE) where the activation condition is low temperature. The activation of the enzyme is temporally controlled as the in vivo temperature returns to the physiological temperature of 37° C. Thus, for example, tsAMDEs provided herein are active at a permissive temperature that is at or about 25° C., but are less active at higher temperatures such as at or about 33° C., 34° C., 35° C., 36° C., 37° C., 38° C. or 39° C. The tsAMDEs provided herein have a ratio of activity at a low permissive temperature (e.g. less then 37° C., such as at or about 25° C.) compared to a non-permissive temperature of at or about 34° C. or 37° C., for example, 33° C., 34° C., 35° C., 36° C., 37° C., 38° C. or 39° C., that is or is about 1.1, 1.2, 1.3, 1.4, 1.5, 1.6, 1.7, 1.8, 1.9, 2.0, 2.5, 3.0, 3.5, 4.0, 4.5, 5, 5.5, 6, 6.5, 7, 7.5, 8, 8.5, 9, 9.5, 10, 15, 20, 30, 40, 50 or more. Thus, the activity of the tsAMDEs provided herein at the non-permissive temperature of at or about 34° C. or 37° C. is or is about 70%, 65%, 60%, 55%, 50%, 45%, 40%, 35%, 30%, 25%, 20%, 15%, 10%, 5%, 4%, 3%, 2%, 1%, 0.5% or less of the activity at the permissive temperature at or about 25° C.

[0259] tsAMDEs, for example tsMMPs, provided herein retain one or more activities of wild-type enzyme, for example, enzymatic activity for cleavage of an ECM component such as collagen. For example, a tsAMDEs provided herein retains an activity at the permissive temperature that is or is about 30%, 40%, 50%, 60%, 70%, 80%, 90%, 100%, 110%, 120%, 140%, 150% or more the activity of wild-type AMDE at the permissive temperature. Generally, tsAMDEs provided herein, however, are less active the then wild-type enzyme at the higher nonpermissive temperature, e.g. physiologic temperature. For example, tsAMDEs provided herein exhibit 95%, 90%, 80%, 70%, 65%, 60%, 55%, 50%, 45%, 40%, 35%, 30%, 25%, 20%, 15%, 10%, 5%, 4%, 3%, 2%, 1%, 0.5%, generally 40%, 30%, 25%, 20%, 15%, 10%, or 5% residual activity of the wild-type enzyme at physiologic temperature (e.g. 34 or 37° C.).

[0260] Where the activating condition is temperature, an activator can be provided that exposes the tsAMDEs to the permissive temperature required for activation. The exposure to the activator can be in vitro or in vivo. The activator can be exposed to the tsAMDEs prior to, simultaneously, subsequently or intermittently upon in vivo administration. The activator can provide the requisite heat or cold required for activation. For example, where the activating condition is low temperature, the activator can be provided as a cold buffer or as an ice pack to be applied to the site of administration. Where the activating condition is heat, the activator can be provided as a warm buffer or as a heat pack to be applied to the site of administration. The activating condition also can be provided by storage of the tsAMDE at the permissive temperature immediately and just prior to use. The duration of exposure to the activator can be continuous, can be for a predetermined time, or can be intermittent (for example, if the tsAMDEs is reversible). Thus, the time period permitting activation is flexible and can be adapted to the particular enzyme that is used, the disease or condition being treated, the site of administration or other factors. It is within the level of the skilled artisan to determine the duration of exposure to the activator.

[0261] In the absence of exposure to the activator providing the activating condition, the tsAMDE present at the non-permissive temperature are inactive or substantially inactive compared to the activity at the permissive temperature. The activating condition of a permissive temperature (e.g. low temperature) not normally present at the site of administration permits the temporal regulation of, and alteration of, the physiological parameters of organs and tissues, such as the interstitium that exhibits a physiologic temperature of approximately 37° C. Under normal physiological conditions, the temperature of the interstitium is approximately 37° C. Thus, for example, tsAMDEs active at low temperatures, when present in the interstitium would normally be catalytically inactive because of the physiologic temperature of the interstitium. When the temperature of the interstitium is temporarily rendered cold, for example, by exposure to a cold buffer or to a cold pack administered on the adjacent surface, tsAMDEs when administered to the interstitium will become activated. When the temperature increases and returns to physiological levels, then the tsAMDEs become inactivate or substantially inactive and cease to exert their enzymatic activity. Hence, by taking advantage of the requirement for exogenous activating conditions, tsAMDEs are activatable and can be made temporally active for a limited duration during use, such as upon in vivo administration to the body.

[0262] The tsAMDEs provided herein include those that are irreversibly inactive following exposure to non-permissive temperatures. Such mutants are active when exposed to permissive temperature conditions (e.g. 25° C.), but are less active or inactive when the temperature is altered to a non-permissive temperatures (e.g. 37° C., such as can occur upon in vivo administration to the body and removal of an exogenous activator (e.g. cold pack)). For example, upon return to permissive conditions, irreversible tsAMDEs polypeptides provided herein exhibit at or about 50%, 60%, 70%, 80%, 90%, 100%, 105%, 110%, 115%, or 120% the activity at non-permissive temperatures. The activity is not reversible.

[0263] Also provided herein are tsAMDEs that are reversibly inactive following exposure to a non-permissive temperature. Such mutants are active when exposed to a permissive temperature condition, but are less active or inactive when the temperature is altered to a non-permissive temperatures. Upon renewed exposure to an activating condition providing the permissive temperature (e.g. cold pack), the activity of the tsAMDEs is restored, thereby rendering the enzyme sufficiently active to degrade one or more components of the ECM. For example, upon return to permissive conditions from nonpermissive conditions, reversible tsAMDEs polypeptides provided herein exhibit at or about 120%, 125%, 130%, 140%, 150%, 160%, 170%, 180%, 200% or more the activity at non-permissive temperatures.

[0264] Typically, tsAMDEs provided herein are zymogens (containing a propeptide) or processed enzymes (lacking a propeptide), or catalytically active forms thereof. As discussed below, most enzymes, including MMPs, are zymogens and require an initial processing event for activity by removal of a propeptide segment from the N-terminal end of the polypeptide. A processing agent, such as a protease or chemical agent, directly or indirectly initiates one or more cleavage events to generate an active enzyme by virtue of removal of the propeptide segment and/or conformational changes that expose the active site of the enzyme. Hence, normally, upon processing of an enzyme to a mature form, the enzyme is active. The activity of a processed enzyme is not reversible, thereby leading to uncontrolled degradation of the ECM upon administration of the processed enzyme to the body. It is contemplated herein that modification of the enzyme to additionally confer temperature sensitivity provides a mechanism to conditionally and temporally control activation of the enzyme to avoid continued activation of the processed form.

[0265] Any AMDE, whether synthetic or isolated from natural sources, such as those set forth in Table 3 or elsewhere herein, zymogen forms thereof, mature forms thereof lacking the propeptide, and catalytically active forms including polypeptides containing only the catalytically active domain, and allelic or species variants or other variants thereof, or any known to those of skill in the art can be modified to be temperature sensitive and is intended for use in the compositions, combinations, methods and apparatus provided herein, so long as the enzyme is activatable due to the requirement of a temperature activating condition. One of skill in the art knows or could identify tsAMDEs. For example, one of skill in the art could use routine molecular biology techniques to introduce amino acid mutations into a matrix-degrading enzyme, and test each for enzyme activation under temperature permissive and non-permissive temperatures to assess the requirement of an exogenous activating condition for sustained or reversible activation of any desired enzyme. Exemplary assays for enzyme activation are provided herein and known in the art, Hence, tsAMDEs provided herein include zymogen forms (e.g. proenzyme), active enzymes lacking a propeptide, and polypeptides containing only the catalytically active domains thereof so long as the tsMMPs exhibits enzymatic activity at the permissive temperature. Hence, modification of the enzyme is in an active form thereof. Exemplary of such a tsAMDEs is a tsMMP-1. tsMMP-1 provided herein contains one or more amino acid modifications in its primary sequence corresponding to amino acid replacements in a wild-type MMP-1 set forth in SEQ ID NO: 327. Exemplary modifications are described below. The tsMMP-1 mutants provided herein include those that are zymogens or those that are active enzymes lacking a propeptide so long as such forms contain the mutation. The zymogen or active polypeptides provided herein include those that are full-length, include all or a portion of the proline rich linker or the hemopexin binding doman, lack all or a portion of the proline rich linker or the hemopexin binding domain, or polypeptides that include only the catalytically active domains thereof (e.g. corresponding to amino acids 81-242 of the sequence of amino acids set forth in SEQ ID NO: 327) so long as the tsMMP-1 retains enzymatic activity at the permissive temperature.

[0266] It is understood that when provided in zymogen form, the tsAMDEs are inactive and that processing by a processing agent is required for activity. Generally, the processing of the enzyme is effected prior to use, such as prior to administration in vivo. The processing agent can be applied simultaneously, intermittently or subsequently to exposure of the tsAMDEs to the activating condition (e.g. low temperature) and administration to the body. Generally, the processing agent is chosen that is acceptable for administration to a subject. If desired, the processing agent can be purified away from the enzyme, for example by dialysis or other purification method, before administration. Thus, for zymogen forms of the enzyme, two steps are required for activation: 1) exposure to a processing agent; and 2) exposure to an activating condition. Whether in zymogen or processed form, exposure of the tsAMDEs to an activator at the permissive temperature temporally controls activity of a tsAMDE.

[0267] tsAMDEs can be further modified to alter any one or more properties or activities. For example, altered properties or activities include, but are not limited to, modification that render the enzyme more stable, alter the substrate specificity and/or increase resistance to one or more inhibitors. For example, as described elsewhere herein, tsAMDEs can be modified to alter its substrate specificity. For example, an enzyme can be modified to have increased specificity for a particular substrate. Thus, for example, a tsAMDE, which exhibits substrate specificity for type I and type IV collagen can be modified so that it has increased substrate specificy for type I collagen, and not type IV collagen, and vice versa. If desired, enzyme stability also can be increased by pegylation or glycosylation of the enzyme. Modifications of polypeptides can be achieved by routine molecular biology techniques, and are within the skill of one in the art. For purposes herein, modified tsAMDEs retain one or more activities of the wild-type enzyme at the permissive temperature. Retained activity can be 40%, 50%, 60%, 70%, 80%, 90%, 95%, 100%, 110%, 120%, 130%, 140%, 150%, or more activity of the wild-type MMP at the permissive temperature. Modified enzymes can be tested for their substrate specificity using routine assays for substrate cleavage such as is described herein, or known in the art. For example, substrate cleavage can be assessed on fluorogenic peptides or on purified proteins. Cleavage can be assessed using in vitro or in vivo assays. For example, cleavage can be assessed by incubating the enzyme with the substrate, and then running the mixture on an SDS-PAGE gel. Degradation can be assessed by Western Blot or by using standard protein stains such as Coomasie Blue or Silver Stain reagents.

[0268] The tsAMDEs are provided herein as compositions, combinations and containers. The tsAMDEs are provided in a therapeutically effective amount, that when activated, degrade one or more components of the ECM upon administration, such as upon sub-epidermal administration. The resulting tsAMDEs can be used as therapeutics to treat ECM-mediated diseases or conditions.

[0269] For example, the tsAMDEs are provided in compositions, combinations and/or containers with an activator that provides the activating condition. In some examples, tsAMDEs also are provided in compositions, combinations and/or containers with a processing agent. The activator and/or processing agent can be in the same composition or in separate compositions and in the same container or separate containers with the tsAMDEs. In addition, the tsAMDEs also can be combined or provided in combination, such as in containers, with other agents such as any one or more of an anesthetic, alpha-adrenergic agent, dispersing agent, or therapeutic agent. The tsAMDEs can be provided in the same or separate composition as other agents and/or can be provided in the same or separate containers.

[0270] The tsAMDEs can be provided as a liquid or in lyophilized form at a therapeutically effective concentration. Alternatively, the tsAMDEs can be provided as a concentrated liquid, such that addition of a sufficient amount of activator results in a therapeutically effective concentration of enzyme. The enzymes can be provided as a solution or suspension or encapsulated into a suitable delivery vehicle, such as a liposome, glass particle, capillary tube, drug delivery vehicle, gelatin, gel, tablet, capsule, pill, time release coating, as well as transdermal patch preparation and dry powder inhalers or other such vehicle. The activator typically is provided as a liquid solution or suspension for administration into the interstitium either alone or following reconstitution of and/or exposure to the tsAMDEs. In some examples, the activator is provided exogenously and applied at the site of administration. For example, an activator can be a hot or cold pack that can be applied to the site of administration, e.g. the skin, prior to, simultaneously, subsequently or intermittently following administration of a tsAMDEs. As described below, kits containing these combinations and also articles of manufacture, such as containers, also are provided.

[0271] Thus, when desired, the tsAMDEs enzyme is subjected to activating conditions in which the enzyme is exposed to an activator to generate an enzyme that is active. Exposure to an activator can be achieved in vitro or in vivo. For example, where an activatable enzyme and activator are separately provided, they can be administered together or separately. Where administered separately, the tsAMDEs can be administered simultaneously, subsequently or intermittently from the activator. In another example, the tsAMDEs, in a lyophilized or concentrated liquid form, can be reconstituted with the activator just prior to use. In such an example, the mixture of the tsAMDEs and activator are administered together. Such methods of activation can be empirically determined by one of skill in the art, and may differ depending on the choice of enzyme and activator, and the method of treatment and treatment regime desired.

[0272] The activatable matrix-degrading enzyme can be provided in an article or manufacture alone or in combination with the activator. For example, if the enzyme is provided in combination with the activator, an article of manufacture can contain an enzyme, either lyophilized or in liquid form, in one compartment, and an activator in an adjacent compartment. The compartments can be separated by a dividing member. Articles of manufacture can additionally contain a processing agent. Such articles of manufacture are described elsewhere herein.

[0273] The combinations of tsAMDEs and activator also can further contain other agents, discussed in detail below. For example, in addition to the activator and tsMMP, combinations are provided containing one or more of a anesthetic, vasoconstrictor, dispersing agent or other therapeutic agent.

[0274] i. Temperature-Sensitive Matrix Metalloprotease Mutants

[0275] Provided herein are tsMMP polypeptides, for example tsMMP-1 polypeptides, that are temperature sensitive by virtue of modifications in the primary sequence of the polypeptide compared to an unmodified MMP polypeptide. The tsMMP polypeptide exhibits increased enzymatic activity at a permissive temperature compared with activity of the tsMMP polypeptide at a non-permissive temperature. For example, tsMMP polypeptides provided herein exhibit increased enzymatic activity at a low temperature that is less then 37° C., for example, that is at or about 20° C., 21° C., 22° C., 23° C., 24° C., 25° C., 26° C., 27° C., 28° C., 29° C. or 30° C., in particular at or about 25° C. compared to a non-permissive high temperature that is at or about 34° C., 35° C., 36° C., 37° C., 38° C. or 39° C., in particular at or about 34° C. or 37° C. Due to the temperature-dependent activity of tsMMP polypeptides, the activity of MMP can be conditionally controlled, thereby temporally regulating activation to prevent prolonged and unwanted degradation of the ECM. In particular, such tsMMP polypeptides can be used in uses, processes or methods to treat diseases or conditions of the ECM, for example, to treat collagen-mediated diseases or conditions such as cellulite.

[0276] The tsMMP polypeptides provided herein have a ratio of activity at a permissive temperature compared to a non-permissive temperature that is or is about 1.1, 1.2, 1.3, 1.4, 1.5, 1.6, 1.7, 1.8, 1.9, 2.0, 2.5, 3.0, 3.5, 4.0, 4.5, 5, 5.5, 6, 6.5, 7, 7.5, 8, 8.5, 9, 9.5, 10, 15, 20, 30, 40, 50 or more. Thus, the activity of tsMMP polypeptides provided herein at the non-permissive temperature is or is about 70%, 65%, 60%, 55%, 50%, 45%, 40%, 35%, 30%, 25%, 20%, 15%, 10%, 5%, 4%, 3%, 2%, 1%, 0.5% or less of the activity at a permissive temperature. tsMMPs polypeptides provided herein retain one or more activities of wild-type MMP polypeptide, for example, enzymatic activity for cleavage of an ECM component such as collagen. Typically, such activity is substantially unchanged (less than 1%, 5%, 10%, 20% or 30% changed) compared to a wild-type or starting protein. In other examples, the activity of a modified MMP polypeptide is increased or is decreased as compared to a wild-type or starting MMP-1 polypeptide. Activity is assessed at the permissive temperature and is compared to the activity of a starting, unmodified MMP polypeptide at the permissive temperature or a non-permissive temperature. For example, a tsMMP polypeptide provided herein retains an activity at the permissive temperature that is or is about 10%, 20%, 30%, 40%, 50%, 60%, 70%, 80%, 90%, 100%, 110%, 120%, 140%, 150% or more the activity of wild-type MMP-1 at the permissive temperature or non-permissive temperature. Activity can be assessed in vitro, ex vivo or in vivo and can be compared to that of the unmodified MMP polypeptide, such as for example, an inactive MMP polypeptide set forth in SEQ ID NO: 327 activated by a processing agent, or any other MMP polypeptide known to one of skill in the art that is used as the starting material. As discussed elsewhere herein, it is understood that the zymogen inactive form of an MMP or a modified MMP must be processed to an active form before use or measurement of an activity.

[0277] Modifications in an MMP polypeptide can be made to any form of an MMP polypeptide, including inactive or active forms, allelic and species variants, splice variants, variants known in the art, or hybrid or chimeric MMP polypeptides. For example, modifications provided herein can be made in any exemplary MMP polypeptide set forth in Table 3, including precursor polypeptides, inactive proenzyme forms, zymogen forms, active forms thereof and allelic or species variants thereof. For example, an exemplary MMP is an precursor MMP-1 polypeptide set forth in SEQ ID NO:98, an inactive pro-enzyme MMP-1 containing the propeptide set forth in SEQ ID NO: 327, a mature MMP-1 polypeptide lacking the propeptide set forth in SEQ ID NO: 99, or any species, allelic or modified variant and active fragments thereof that has 40%, 50%, 60%, 70%, 80%, 90%, 91%, 92%, 93%, 94%, 95%, 96%, 97%, 98%, or 99% sequence identity to any of the MMP-1 polypeptides set forth in SEQ ID NOS: 98-99, 327. Modifications also can be in an MMP polypeptide lacking one or more domains, so long as the MMP polypeptide is temperature sensitive (i.e. contains the modification) and retains enzymatic activity. For example, modifications can be in an MMP polypeptide that includes only the catalytic domain (for example in MMP-1 corresponding to amino acids 81-242 of the proenzyme MMP-1 polypeptide set forth in SEQ ID NO: 327). Modifications also can be made in an MMP polypeptide lacking all or a portion of the proline rich linker (for example in MMP-1 corresponding to amino acids 243-258 of the proenzyme MMP-1 polypeptide set forth in SEQ ID NO: 327) and/or lacking all or a portion of the hemopexin binding domain (for example in MMP-1 corresponding to amino acids 259-450 of the proenzyme MMP-1 polypeptide set forth in SEQ ID NO: 327). Allelic variants of MMP-1 polypeptides include, but are not limited to, any of MMP-1 polypeptide containing any one or more amino acid variant set forth in SEQ ID NO:537. Exemplary species variants for modification herein include, but are not limited to, pig, rabbit, bovine, horse, rat, and mouse, for example, set forth in any of SEQ ID NOS: 527-532. Modifications in an MMP polypeptide provided herein to confer temperature sensitivity can be made to an MMP polypeptide that also contains other modifications, such as those described in the art, including modification of the primary sequence and modifications not in the primary sequence of the polypeptide. It is understood that modifications in an allelic or species variant or other variant include modification in any form thereof such as an active or inactive form, a form including only the catalytic domain, or a form lacking all or a portion of the proline rich linker or the hemopexin binding domain so long as the modified form contains the temperature sensitive modification and is temperature sensitive. As discussed herein below, corresponding MMP-1 modifications can be made to similar forms of other MMP polypeptides.

[0278] Hence, the resulting modified MMP polypeptides include those that are inactive zymogen proenzymes and those that are active polypeptides. For example, any modified polypeptide provided herein that is a zymogen proenzyme can be activated by a processing agent to generate an active MMP polypeptide. Processing agents include, but are not limited to, any set forth in Table 3A below. Activation of MMP-1 polypeptides are typically exhibited in its active form following cleavage of the propeptide and/or intermolecular and intramolecular processing of the enzyme to remove the propeptide (see e.g. Visse et al. (2003) Cir. Res., 92:827-839; Khan et al. (1998) Protein Science, 7:815-836; Okada et al. (1988) Biochem J., 254:731-741; Okada & Nakanashi (1989) FEBS Lett., 249:353-356; Nagase et al. (1990) Biochemistry, 29:5783-5789; Koklitis et al. (1991) Biochem J., 276:217-221; Springman et al. (1990) PNAS, 87:364-8; Murphy et al. (1997) Matrix Biol., 15:511-8).

TABLE 3A
Zymogen Activators
Proteolytic Compounds

| | |
|---|---|
| Proteases | Plasmin |
| | Plasma kallikrein |
| | Trypsin-1 (Trypsin I) |
| | Trypsin-2 (Trypsin II) |
| | Neutrophil elastase |
| | Cathepsin G |
| | Tryptase |
| | Chymase |
| | Proteinase-3 |
| | Furin |
| | uPA |
| | MMPs, including MMP-1, MMP-2, MMP-3, |
| | MMP-7, MMP-10, MMP-26, and |
| | MT1-MMP |

Non-Proteolytic Compounds

| | |
|---|---|
| Thiol-modifying Agents | 4-aminophenylmercuric acetate (AMPA) |
| | HgCl₂ |
| | N-ethylmaleimide |
| Conformational Perturbants | Sodium dodecyl sulfate (SDS) |
| | Chaotropic agents |
| Other Chemical Agents | Oxidized glutathione (GSSG) |
| | Reactive oxygen |
| | Au(I) salts |

Other Activating Conditions

Acidic pH
Heat

[0279] Modifications provided herein of a starting, unmodified reference polypeptide include amino acid replacements or substitutions, additions or deletions of amino acids, or any combination thereof. For example, tsMMP polypeptides include those with 1, 2, 3, 4, 5, 6, 7, 8, 9, 10, 11, 12, 13, 14, 15, 16, 17, 18, 19, 20 or more modified positions. Also provided herein are modified tsMMP polypeptides with two or more modifications compared to a starting reference MMP-1 polypeptide. Modified MMP polypeptides include those with 2, 3, 4, 5, 6, 7, 8, 9, 10, 11, 12, 13, 14, 15, 16, 17, 18, 19, 20 or more modified positions. Any modification provided herein can be combined with any other modification known to one of skill in the art so long as the resulting modified MMP polypeptide retains enzymatic activity when it is in its activated form and so long as the enzymatic activity is greater at the permissive temperature compared to the non-permissive temperature. Modified MMP polypeptides provided herein can be assayed for enzymatic activity under various conditions (e.g. permissive and non-permissive temperatures) to identify those that retain enzymatic activity.

[0280] The modifications provided herein can be made by standard recombinant DNA techniques such as are routine to one of skill in the art. Any method known in the art to effect mutation of any one or more amino acids in a target protein can be employed. Methods include standard site-directed mutagenesis (using e.g. a kit, such as QuikChange available from Stratagene) of encoding nucleic acid molecules, or by solid phase polypeptide synthesis methods.

[0281] Other modifications that are or are not in the primary sequence of the polypeptide also can be included in a modified MMP polypeptide, or conjugate thereof, including, but not limited to, the addition of a carbohydrate moiety, the addition of a polyethylene glycol (PEG) moiety, the addition of an Fc domain, etc. For example, such additional modifications can be made to increase the stability of half-life of the protein.

[0282] 1) Exemplary tsMMP-1 Modifications

[0283] Provided herein are modified MMP-1 polypeptides containing one or more amino acid modifications in a starting, unmodified MMP-1 polypeptide. The amino acid replacement or replacements can be at any one or more positions corresponding to any of the following positions: 84, 85, 95, 98, 99, 100, 103, 104, 105, 106, 109, 110, 111, 112, 118, 123, 124, 126, 147, 150, 151, 152, 153, 155, 156, 158, 159, 170, 171, 176, 178, 179, 180, 181, 182, 183, 185, 187, 188, 189, 190, 191, 192, 194, 195, 197, 198, 206, 207, 208, 210, 211, 212, 218, 223, 227, 228, 229, 230, 233, 234, 237, 240, 251, 254, 255, 256, 257 and 258 of an unmodified MMP-1 polypeptide having a sequence of amino acids set forth in SEQ ID NO: 327, or at a corresponding position in an allelic or species variant or other variant of an MMP-1 polypeptide that has at least or at least about 60%, 70%, 75%, 80%, 85%, 90%, 91%, 92%, 93%, 94%, 95%, 96%, 97%, 98%, 99% or more sequence identity to an MMP-1 polypeptide set forth in SEQ ID NO: 327. Amino acid replacements include replacement of amino acids to an acidic (D or E); basic (H, K or R); neutral (C, N, Q, T, Y, S, G) or hydrophobic (F, M, W, I V, L A, P) amino acid residue. For example, amino acid replacements at the noted positions include replacement by amino acid residues E, H, R, C, Q, T, S, G, M, W, I, V, L, A, P, N, F, D, Y or K. Such modified MMP-1 polypeptides include MMP-1 polypeptides that are temperature sensitive by virtue of increased activity at the permissive temperature of 25° C. compared to the non-permissive temperatures of 34° C. or 37° C.

[0284] For example, modified MMP-1 polypeptides provided herein can include polypeptides having an amino acid modification corresponding to any one or more modifications of T84F (i.e. replacement of T by F at a position corresponding to position 84 of an MMP-1 polypeptide set forth in SEQ ID NO:327), E85F, L95K, L95I, R98D, 199Q, E100V, E100R, E100S, E100T, E100F, E100I, E100N, T103Y, P104A, P104M, D105A, D105F, D105G, D105I, D105L, D105N, D105R, D105S, D105T, D105W, D105E, L106C, L106S, A109H, D110A, V111R, D112S, A118T, S123V, N124D, T126S, G147P, R150P, R150V, R150D, R1501, R150H, D151G, N152A, N152S, S153T, F155L, F155A, D156H, D156L, D156A, D156W, D156V, D156K, D156T, D156R, D156M, P158T, P158G, P158K, P158N, G159V, G159T, G159M, G1591, G159W, G159L, G159C, P170D, P170A, G171P, G171E, G171D, A176F, A176W, F178T, F178L, D179N, D179V, D179C, E180Y, E180R, E180T, E180F, E180G, E180S, E180N, E180D, E181T, D181L, D181K, D181C, D181G, E182T, E182Q, E182M, E182G, E183G, R183S, T185R, T185Y, T185H, T185G, T185V, T185Q, T185A, T185E, T185D, N187R, N187M, N187W, N187F, N187K, N187I, N187A, N187G, N187C, N187H, F188V, R189N, R189T, R189Q, E190G, E190Y, E190D, Y191V, N192H, N192S, N192D, N192C, H194P, R195c, R195W, R195L, R195G, R195Q, R195A, R195D, R195V, A197C, A197V, A198G, A198L, A198M, G206A, G206S, L207R, L207V, L207I, L207G, S208R, S208L, S210V, S210A, T211L, D212G, D212H, Y218S, F223C, F223E, F223G, F223A, F223S, F223K, F223M, V227C, V227D, V227E, V227L, V227S, V227W, V227G, V227H, V227Q, V227R, Q228P, L229A, L229T, L291, A230V, D233E, I234A, I234T, I234E, I234Q, I237L, I237W, I237N, I240S, I240A, I240C, I251S, I251W, Q254S, T255H, P256C, K257P, K257T and A258P. Exemplary modified MMP-1 polypeptides have a sequence of amino acids set forth in any of SEQ ID NOS: 328-526 and active forms and other forms thereof, and allelic and species variants thereof.

[0285] In some examples, such modified MMP-1 polypeptides include polypeptides having an amino acid replacement or replacements at any one or more positions corresponding to any of the following positions: 95, 100, 103, 105, 150, 151, 153, 155, 156, 159, 171, 176, 179, 180, 181, 182, 185, 187, 190, 191, 192, 194, 195, 198, 206, 207, 210, 212, 218, 223, 227, 228, 229, 230, 233, 234, 237 and 240 of an unmodified MMP-1 polypeptide having a sequence of amino acids set forth in SEQ ID NO: 327, or at a corresponding position in an allelic or species variant or other variant of an MMP-1 polypeptide that has at least or at least about 60%, 70%, 75%, 80%, 85%, 90%, 91%, 92%, 93%, 94%, 95%, 96%, 97%, 98%, 99% or more sequence identity to an MMP-1 polypeptide set forth in SEQ ID NO: 327. For example, modified MMP-1 polypeptides provided herein include polypeptides having an amino acid modification corresponding to any one or more modifications of L95K, E100V, T103Y, D105A, D105F, D105G, D105I, D105L, D105N, D105R, D105S, D105T, D105W, R150P, D151G, S153T, F155L, F155A, D156H, D156L, D156A, D156W, D156V, D156K, D156T, D156R, G159V, G159T, G171P, A176F, D179N, E180Y, E180R, E180T, E180F, E181T, D181L, D181K, E182T, E182Q, T185R, T185Y, T185H, T185G, T185V, T185Q, T185A, T185E, N187R, N187M, N187W, N187F, N187K, N1871, N187A, E190G, Y191V, N192H, N192S, N192D, N192C, H194P, R195c, R195W, R195L, R195G, R195Q, R195A, R195D, R195V, A198G, A198L, A198M, G206A, G206S, L207R, L207V, S210V, D212G, Y218S, F223C, F223E, F223G, F223A, F223S, V227C, V227D, V227E, V227L, V227S, V227W, Q228P, L229A, L229T, L229I, A230V, D233E, I234A, I234T, I234E, I234Q, I237L, I240S, I240A, and I240C. Such modified MMP-1 polypeptides exhibit at least 1.2 times or more activity at the permissive temperature of 25° C. compared to the non-permissive temperatures of 34° C. or 37° C., for example, 1.2, 1.3, 1.4, 1.5, 1.6, 1.7, 1.8, 1.9, 2.0, 2.5, 3.0, 3.5, 4.0, 4.5, 5, 5.5, 6, 6.5, 7, 7.5, 8, 8.5, 9, 9.5, 10, 15, 20, 30, 40, 50 or more times the activity. Exemplary of such modified MMP-1 polypeptides have a sequence of amino acids set forth in any of SEQ ID NOS: 328, 331-340, 345-352, 354-357, 359, 363, 365, 368, 371, 373-374, 377-378, 380, 382-384, 388-395, 397-398, 401-419, 421-422, 424-426, 428-430, 433, 435, 437-450, 457-459, 462, 465-472, 477-478, 518, and active forms and other forms thereof, and allelic and species variants thereof.

[0286] In other examples, such modified MMP-1 polypeptides include polypeptides having an amino acid replacement or replacements at any one or more positions corresponding to any of the following positions: 95, 105, 150, 151, 155, 156, 159, 176, 179, 180, 181, 182, 185, 187, 195, 198, 206, 210, 212, 218, 223, 227, 228, 229, 230, 233, 234, and 240 of an unmodified MMP-1 polypeptide having a sequence of amino acids set forth in SEQ ID NO: 327, or at a corresponding position in an allelic or species variant or other variant of an MMP-1 polypeptide that has at least or at least about 60%, 70%, 75%, 80%, 85%, 90%, 91%, 92%, 93%, 94%, 95%, 96%, 97%, 98%, 99% or more sequence identity to an MMP-1 polypeptide set forth in SEQ ID NO: 327. For example, modified MMP-1 polypeptides provided herein include polypeptides having an amino acid modification corresponding to any one or more modifications of L95K, D105A, D105F, D105G, D1051, D105L, D105N, D105R, D105S, D105T, D105W, R150P, D151G, F155A, D156K, D156T, D156L, D156A, D156W, D156V, D156H, D156R, G159V, G159T, A176F, D179N, E180Y, E180T, E180F, D181L, D181K, E182T, E182Q, T185R, T185H, T185Q, T185A, T185E, N187R, N187M, N187F, N187K, N187I, R195V, A198L, A198M, G206A, G206S, S210V, Y218S, F223E, V227C, V227E, V227W, Q228P, L229T, L2291, D233E, I234A, I234T, I234E, I240S, and I240C. Such modified MMP-1 polypeptides exhibit at least 1.5 times or more activity at the permissive temperature of 25° C. compared to the non-permissive temperatures of 34° C. or 37° C., for example, 1.5, 1.6, 1.7, 1.8, 1.9, 2.0, 2.5, 3.0, 3.5, 4.0, 4.5, 5, 5.5, 6, 6.5, 7, 7.5, 8, 8.5, 9, 9.5, 10, 15, 20, 30, 40, 50 or more times the activity. Exemplary of such modified MMP-1 polypeptides have a sequence of amino acids set forth in any of SEQ ID NOS: 328, 331-340, 345-346, 348-352, 534-357, 359, 363, 365, 368, 373-374, 377-378, 382-384, 388-391, 395, 397-398, 401-402, 404, 411, 415-419, 421-422, 430, 433, 437, 439-441, 443-444, 446-449, and active forms and other forms thereof, and allelic and species variants thereof.

[0287] In additional examples, modified MMP-1 polypeptides provide herein include modified MMP-1 polypeptides that are temperature sensitive at the permissive temperature of 25° C. and exhibit at least 30%, for example, 30%, 40%, 50%, 60%, 70%, 80%, 90%, 100%, 110%, 120%, 140%, 150% or more activity at 25° C. compared to wild-type MMP-1 at 25° C. Such modified MMP-1 polypeptides include polypeptides having an amino acid replacement or replacements at any one or more positions corresponding to any of the following positions: 95, 105, 150, 156, 159, 179, 180, 182, 185, 187, 195, 198, 212, 223, 227, 234, and 240 of an unmodified MMP-1 polypeptide having a sequence of amino acids set forth in SEQ ID NO: 327, or at a corresponding position in an allelic or species variant or other variant of an MMP-1 polypeptide that has at least or at least about 60%, 70%, 75%, 80%, 85%, 90%, 91%, 92%, 93%, 94%, 95%, 96%, 97%, 98%, 99% or more sequence identity to an MMP-1 polypeptide set forth in SEQ ID NO: 327. For example, modified MMP-1 polypeptides provided herein include polypeptides having an amino acid modification corresponding to any one or more modifications L95K, D105A, D105G, D105I, D105L, D105N, D105S, D105W, D105T, R150P, D156K, D156T, D156V, D156H, D156R, G159V, G159T, D179N, E180Y, E180T, E180F, E182T, T185H, T185Q, T185E, N187M, N187K, N1871, R195V, A198L, F223E, V227E, I234E and I240S. Exemplary of such modified MMP-1 polypeptides have a sequence of amino acids set forth in any of SEQ ID NOS: 328, 332-335, 337-340, 345, 349-352, 355, 359, 363, 368, 373-374, 377, 384, 388-389, 391, 397, 402, 404, 411, 416, 422, 430, 444, 449, or active forms and other forms thereof, and allelic and species variants thereof.

[0288] In particular, modified MMP-1 polypeptides provided herein have an amino acid replacement or replacements at any one or more positions corresponding to any of the following positions: 95, 105, 150, 156, 159, 179, 180, 182, 185, 187, 198, 227, 234 and 240 of an unmodified MMP-1 polypeptide having a sequence of amino acids set forth in SEQ ID NO: 327, or at a corresponding position in an allelic or species variant or other variant of an MMP-1 polypeptide that has at least or at least about 60%, 70%, 75%, 80%, 85%, 90%, 91%, 92%, 93%, 94%, 95%, 96%, 97%, 98%, 99% or more sequence identity to an MMP-1 polypeptide set forth in SEQ ID NO: 327. Such modified MMP-1 polypeptides provided herein include polypeptides having an amino acid modification corresponding to any one or more modifications L95K, D105I, D105N, D105L, D105A, D105G, R150P, D156R, D156H, D156K, D156T, G159V, G159T, D179N, E180T, E180F, E182T, T185Q, N187I, A198L, V227E, I234E and I240S. More particularly, modified MMP-1 polypeptides provided herein include polypeptides having an amino acid modification corresponding to any one or more modifications L95K, D105N, R150P, D156K, D156T, G159V, D179N, E180T, A198L, V227E, and I240S.

[0289] Modified MMP-1 polypeptides provided herein include those that exhibit reversible or irreversible (also called non-reversible) temperature-dependent activity. In all cases, modified MMP-1 polypeptides provided herein exhibit increased activity at a permissive temperature (e.g. 25° C.) compared to a non-permissive temperatures (e.g. 34° C. or 37° C.) For non-reversible polypeptides, exposure to the non-permissive temperature prior to, subsequently or intermittently from exposure to the permissive temperature renders the polypeptide irreversibly inactive. Thus, a modified MMP-1 polypeptide that is returned to temperature permissive conditions, for example 25° C., exhibits the same or similar activity of the MMP-1 polypeptide at non-permissive temperatures, for example, 34° C. or 37° C. For example, upon return to permissive conditions, irreversible modified MMP-1 polypeptides provided herein exhibit at or about 50%, 60%, 70%, 80%, 90%, 100%, 105%, 110%, 115%, or 120% the activity at non-permissive temperatures. Exemplary non-reversible modified MMP-1 polypeptides provided herein include polypeptides having an amino acid modification corresponding to any one or more modifications L95K, D105I, D105L, D105N, D105R, D105W, D151G, F155A, D156K, D156T, D156L, D156A, D156W, D156V, D156H, D156R, G159V, A176F, D179N, D181L, D181K, E182T, E182Q, T185R, N187F, N1871, G206A, G206S, V227C, V227E, Q228E, L229T, D233E, I234A, I234T, I234E, I240S, for example, any set forth in any of SEQ ID NOS: 328, 331-332, 337-339, 346, 348, 349-352, 354-357, 363, 365, 368, 378, 382-384, 390, 401, 404, 417-418, 430, 433, 439-440, 443-444, 446-447, 449 or active forms and other forms thereof, and allelic and species variants thereof.

[0290] For reversible polypeptides, exposure to the non-permissive temperature prior to, subsequently or intermittently from exposure to the permissive temperature renders the polypeptide reversibly active. Thus, a modified MMP-1 polypeptide that is returned to temperature permissive conditions recovers activity, and thereby exhibits increased activity at the permissive temperature compared to the non-permissive temperature. In such examples, the recovered activity can be complete or is partial. Thus, a modified MMP-1 polypeptide that is returned to temperature permissive conditions, for example 25° C., exhibits an increased activity compared to activity at non-permissive temperatures, for example, 34° C. or 37° C. For example, upon return to permissive conditions, reversible modified MMP-1 polypeptides provided herein exhibit at or about 120%, 125%, 130%, 140%, 150%, 160%, 170%, 180%, 200% or more the activity at non-permissive temperatures. Exemplary non-reversible modified MMP-1 polypeptides provided herein include polypeptides having an amino acid modification corresponding to any one or more modifications D105A, D105F, D105G, D105S, D105T, R150P, G159T, E180Y, E180T, E180F, T185H, T185Q, T185A, T185E, N187R, N187M, N187K, R195V, A198L, A198M, S210V, Y218S, F223E, V227W, L229I and I240C, for example, any set forth in any of SEQ ID NOS: 333-336, 340, 345, 359, 373-374, 377, 388-389, 391, 395, 397-398, 402, 411, 415-416, 419, 421-422, 437, 441, 448, or active forms and other forms thereof, and allelic and species variants thereof.

[0291] 2) Combinations

[0292] Provided herein are modified MMP-1 polypeptides that contain 2, 3, 4, 5, 6, 7, 8, 9, 10, 11, 12, 13, 14, 15, 16, 17, 18, 19, 20 or more modifications compared to a starting or reference MMP-1 polypeptide. Modified MMP-1 polypeptides provided herein can contain any two or more modifications provided above. For example, modified MMP-1 polypeptides provided herein contain amino acid replacements at any two or more positions corresponding to any of the following positions: 84, 85, 95, 98, 99, 100, 103, 104, 105, 106, 109, 110, 111, 112, 118, 123, 124, 126, 147, 150, 151, 152, 153, 155, 156, 158, 159, 170, 171, 176, 178, 179, 180, 181, 182, 183, 185, 187, 188, 189, 190, 191, 192, 194, 195, 197, 198, 206, 207, 208, 210, 211, 212, 218, 223, 227, 228, 229, 230, 233, 234, 237, 240, 251, 254, 255, 256, 257 and 258 of an unmodified MMP-1 polypeptide having a sequence of amino acids set forth in SEQ ID NO: 327, or at a corresponding position in an allelic or species variant or other variant of an MMP-1 polypeptide that has at least or at least about 60%, 70%, 75%, 80%, 85%, 90%, 91%, 92%, 93%, 94%, 95%, 96%, 97%, 98%, 99% or more sequence identity to an MMP-1 polypeptide set forth in SEQ ID NO: 327 Generally, such combination mutants are temperature sensitive and exhibit increased enzymatic activity at a permissive temperature compared with activity of the tsMMP-1 polypeptide at a non-permissive temperature. Typically, combination mutants also retain activity at the permissive temperature compared to the single mutant MMP-1 polypeptides alone or compared to an unmodified MMP-1 polypeptide not containing the amino acid changes (e.g a wild-type MMP-1 polypeptide set forth in SEQ ID NO: 327 or active forms or other forms thereof) at the permissive or non-permissive temperature.

[0293] Exemplary MMP-1 combination mutants provided herein contain amino acid replacements at any two or more positions corresponding any of the following positions: 95, 105, 150, 156, 159, 179, 180, 182, 185, 187, 198, 227, 234 and 240 of an unmodified MMP-1 polypeptide having a sequence of amino acids set forth in SEQ ID NO: 327, or at a corresponding position in an allelic or species variant or other variant of an MMP-1 polypeptide that has at least or at least about 60%, 70%, 75%, 80%, 85%, 90%, 91%, 92%, 93%, 94%, 95%, 96%, 97%, 98%, 99% or more sequence identity to an MMP-1 polypeptide set forth in SEQ ID NO: 327. For example, modified MMP-1 polypeptides provided herein include polypeptides having amino acid modification corresponding to any two or more modifications L95K, D105I, D105N, D105L, D105A, D105G, R150P, D156R, D156H, D156K, D156T, G159V, G159T, D179N, E180T, E180F, E182T, T185Q, N1871, A198L, V227E, I234E and I240S. More particularly, modified MMP-1 polypeptides provided herein include polypeptides having amino acid modification corresponding to any two or more modifications L95K, D105N, R150P, D156K, D156T, G159V, D179N, E180T, A198L, V227E, and I240S. It is understood that at least two different positions are modified in the combination mutants provided herein. Exemplary MMP-1 combination mutant polypeptides provided herein are set forth in Table 27 in Example 29.

[0294] 3) Additional Modifications

[0295] Any modified MMP, for example any modified MMP-1, polypeptide provided herein also can contain one or more other modifications described in the art. The additional modifications can include, for example, any amino acid substitution, deletion or insertion known in the art. In addition to containing one or modification described above, any modified MMP-1 polypeptide provided herein can contain 1, 2, 3, 4, 5, 6, 7, 8, 9, 10, 11, 12, 13, 14, 15, 16, 17, 18, 19, 20 or more additional modifications, so long as the resulting MMP-1 polypeptides exhibits increased activity at the permissive temperature (e.g. 25° C.) compared to the non-permissive temperature (e.g. 34° C. or 37° C.) and retains activity of wild-type MMP-1 at the permissive or non-permissive temperature. The additional modifications can confer additional properties to the enzyme, for example, increased stability, increased half-life and/or increased resistance to inhibitors, for example, TIMP. The additional modifications include modifications to the primary sequence of the polypeptide, as well as other modification such as PEGylation and glycosylation of the polypeptide. Generally, such polypeptides include one or more modifications provided herein and exhibit increased activity at the lower temperature then a higher temperature. Exemplary modifications that can be included in a polypeptide provided herein include, but are not limited to, modifications T4P, Q10P, R30M, R30S, T96R, A114V, F166C, I172V, D181H, R189T, E200A, G214E, D232N, D233G, R243S, Q254P, T286A, 1298T, E314G, F315S, V374M, R386Q, S387T, G391S, and T432A of a polypeptide set forth in SEQ ID NO: 327.

[0296] 4) Other MMPs

[0297] Matrix metalloproteases are highly homologous polypeptides and exhibit similar specificities for extracellular matrix components. Exemplary sequences of MMPs are set forth in Table 3, for example, any set forth in SEQ ID NOS: 1, 711, 714, 717, 720, 723, 726, 729, 732, 735, 738, 741, 744, 747, 750, 753, 756, 759, 762, 765, 768, 771, 774 or 777 or zymogen forms, active forms or other forms thereof, or allelic or species variants thereof. FIG. 1 provides an alignment of the zymogen form of exemplary MMP polypeptides. Thus, any of the modifications provided herein in an MMP-1 can be made in any other MMP polypeptide. Hence, based on the description herein, any MMP, species, allelic variant or other variant, can be made temporally active (reversible or irreversible) by virtue of activity at a permissive temperature (generally a lower temperature) compared to a nonpermissive temperature (generally a higher temperature). Such tsMMP mutants can be used by one of skill in the art and used in compositions, processes or methods for the treatment of ECM-mediated diseases or conditions.

[0298] It is within the level of one of skill in the art to align various MMPs to MMP-1 (for example set forth in SEQ ID NO: 327) and identify corresponding residues. Any of the modifications provided herein can be made in any other MMP at the corresponding residue. One of skill in the art can test the activity of the resulting modified polypeptide for temperature sensitivity at a permissive temperature compared to a non-permissive temperature. In particular, it is understood that conservative amino acid differences at a corresponding position in an MMP are functionally invariant. Thus, where a residue in MMP-1 aligns with a conservative residue thereto in another MMP, it is understood that such a residue is contemplated for modification herein. For example, position 95 in an MMP-1 set forth in SEQ ID NO: 327 is a leucine (L). Alignment of SEQ ID NO: 327 with other MMPs shows that position 95 in other MMPs is a leucine, isoleucine (I) or valine (V) residue (see FIG. 1). Each of L, I and V are conservative residues.

[0299] In particular, provided herein are modified MMP polypeptides that are modified by one or more amino acid replacement to confer temperature sensitivity by effecting a corresponding MMP-1 modification at a corresponding residue in an MMP. FIG. 2 depicts exemplary amino acid residues for modification. It is understood that these identified residues are exemplary only and it is within the level of one of skill in the art to effect modification of an MMP at other amino acid residues or other MMP-1 corresponding residues to confer temperature sensitivity. Exemplary modifications provided herein include modification of any MMP, for example, an MMP-8, MMP-13, MMP-18, MMP-2, MMP-9, MMP-3, MMP-10, MMP-11, MMP-7, MMP-26 and MMP-12, at any one or more positions corresponding to any of the following positions: 95, 105, 151, 156, 159, 176, 179, 180, 181, 182, 185, 195, 198, 206, 210, 212, 218, 223, 228, 229, 233, 234, and 240 of an unmodified MMP-1 polypeptide having a sequence of amino acids set forth in SEQ ID NO: 327. The modification includes any one or more of the modifications provided herein above at the corresponding position to the recited position in MMP-1. For example, residue 95 in an MMP-1 polypeptide set forth in SEQ ID NO: 327 corresponds to residue 113 in an MMP-8 polypeptide set forth in SEQ ID NO: 101. Thus, provided herein are modified MMP-8 polypeptides having an amino acid modification L113K of an unmodified MMP-8 polypeptide having a sequence of amino acids set forth in SEQ ID NO:101. Similar modifications are provided herein based on this description.

[0300] Any modified MMP polypeptide provided herein also can contain one or more other modifications described in the art. The additional modifications can include, for example, any amino acid substitution, deletion or insertion known in the art. In addition to containing one or modification described above, any modified MMP polypeptide provided herein can contain 1, 2, 3, 4, 5, 6, 7, 8, 9, 10, 11, 12, 13, 14, 15, 16, 17, 18, 19, 20 or more additional modifications, so long as the resulting MMP polypeptides exhibits increased activity at the permissive temperature (e.g. 25° C.) compared to the non-permissive temperature (e.g. 34° C. or 37° C.) and retains activity of wild-type MMP at the permissive or non-permissive temperature. The additional modifications can confer additional properties to the enzyme, for example, increased stability, increased half-life and/or increased resistance to inhibitors, for example, TIMP. The additional modifications include modifications to the primary sequence of the polypeptide, as well as other modification such as PEGylation and glycosylation of the polypeptide. Generally, such polypeptides include one or more modifications provided herein and exhibit increased activity at the lower themperature then a higher temperature. Exemplary modifications that can be included in a polypeptide provided herein include, but are not limited to, any modifications set forth in Table 3B, below.

TABLE 3B
Exemplary modifications in MMPs

| MMP | SEQ ID NO | Amino Acid Modifications |
|---|---|---|
| MMP-8 | 101 | S3C; T32I; K87E; E154G; D193V; S229T; |
| | | N246Y; A436V; K460T |
| MMP-13 | 104 | H2L; A8V; F75S; D89H; D390G; I427T |
| MMP-2 | 110 | A27S; R101H; D210Y; A228T; F239L; |
| | | E404K; A447V; T498M; V620I; V621L; |
| | | S644I |
| MMP-9 | 113 | A20V; N38S; E82K; N127K; L187F; R239H; |
| | | T258I; Q279R; F571V; P574R; R668Q |
| MMP-3 | 116 | K45E; H113P; R248W |
| MMP-10 | 119 | L4V; V8G; R53K; G65R; E142Q; F226L; |
| | | G282E; L440F; H475L |
| MMP-11 | 122 | V38A; E44K; P61L; S86P; D166N; F182S; |
| | | Q323H |
| MMP-7 | 125 | C7W; R77R; S115T; G137D; P241L |
| MMP-26 | 128 | K43E; S46L; I260M |
| MMP-12 | 131 | N357S; F468L; G469R |
| MMP-19 | 146 | R103C; P245S; P488T; T491M |

[0301] 2. Combinations of Matrix-Degrading Enzymes and Activator

[0302] Combinations of an activatable matrix-degrading enzyme and activator, sufficient for activation of the matrix-degrading enzyme, are provided herein. For purposes herein, the activatable matrix degrading enzyme is provided in an inactive form. Generally, compositions of the activatable matrix-degrading enzyme can be provided separate from the activator. The compositions can be provided separately in the same container or in separate containers. Generally, when packaged by itself, the enzyme is provided so that there are insufficient activating conditions present to render the enzyme active.

[0303] The matrix-degrading enzyme can be provided as a liquid or in lyophilized form at a therapeutically effective concentration. Alternatively, the matrix-degrading enzyme can be provided as a concentrated liquid, such that addition of a sufficient amount of activator results in a therapeutically effective concentration of enzyme. The enzymes can be provided as a solution or suspension or encapsulated into a suitable delivery vehicle, such as a liposome, glass particle, capillary tube, drug delivery vehicle, gelatin, tablet, capsule, pill, time release coating, as well as transdermal patch preparation and dry powder inhalers or other such vehicle. The activator typically is provided as a liquid solution or suspension for administration into the interstitium either alone or following reconstitution of and/or exposure to the matrix-degrading enzyme. As described in Section F below, kits containing these combinations and also articles of manufacture, such as containers, also are provided.

[0304] Thus, when desired, the activatable matrix-degrading enzyme is subjected to activating conditions in which the enzyme is exposed to an activator to generate an active enzyme. Exposure to an activator can be achieved in vitro or in vivo. For example, where an activatable enzyme and activator are separately provided, they can be administered together or separately. Where administered separately, the conditionally activatable matrix-degrading enzyme can be administered simultaneously, subsequently or intermittently from the activator. In another example, the matrix-degrading enzyme, in a lyophilized or concentrated liquid form, can be reconstituted with the activator just prior to use. In such an example, the mixture of the matrix-degrading enzyme and activator are administered together. Such methods of activation can be empirically determined by one of skill in the art, and may differ depending on the choice of enzyme and activator, and the method of treatment and treatment regime desired.

[0305] The activatable matrix-degrading enzyme can be provided in an article or manufacture alone or in combination with the activator. For example, if the enzyme is provided in combination with the activator, an article of manufacture can contain an enzyme, either lyophilized or in liquid form, in one compartment, and an activator in an adjacent compartment. The compartments can be separated by a dividing member. Such articles of manufacture are described elsewhere herein.

[0306] The combinations of matrix-degrading enzyme and activator also can further contain other agents, discussed in detail below. For example, in addition to the activator and matrix-degrading enzyme, combinations are provided containing one or more of a anesthetic, vasoconstrictor or dispersing agent.

### E. METHODS OF PRODUCING NUCLEIC ACIDS ENCODING MATRIX-DEGRADING ENZYMES AND POLYPEPTIDES THEREOF

[0307] Polypeptides of matrix-degrading enzymes set forth herein, can be obtained by methods well known in the art for protein purification and recombinant protein expression. Any method known to those of skill in the art for identification of nucleic acids that encode desired genes can be used. Any method available in the art can be used to obtain a full length (i.e., encompassing the entire coding region) cDNA or genomic DNA clone encoding a desired matrix-degrading enzyme, such as from a cell or tissue source. Modified or variant matrix-degrading enzymes, can be engineered from a wildtype polypeptide, such as by site-directed mutagenesis.

[0308] Polypeptides can be cloned or isolated using any available methods known in the art for cloning and isolating nucleic acid molecules. Such methods include PCR amplification of nucleic acids and screening of libraries, including nucleic acid hybridization screening, antibody-based screening and activity-based screening.

[0309] Methods for amplification of nucleic acids can be used to isolate nucleic acid molecules encoding a desired polypeptide, including for example, polymerase chain reaction (PCR) methods. A nucleic acid containing material can be used as a starting material from which a desired polypeptide-encoding nucleic acid molecule can be isolated. For example, DNA and mRNA preparations, cell extracts, tissue extracts, fluid samples (e.g. blood, serum, saliva), samples from healthy and/or diseased subjects can be used in amplification methods. Nucleic acid libraries also can be used as a source of starting material. Primers can be designed to amplify a desired polypeptide. For example, primers can be designed based on expressed sequences from which a desired polypeptide is generated. Primers can be designed based on back-translation of a polypeptide amino acid sequence. Nucleic acid molecules generated by amplification can be sequenced and confirmed to encode a desired polypeptide.

[0310] Additional nucleotide sequences can be joined to a polypeptide-encoding nucleic acid molecule, including linker sequences containing restriction endonuclease sites for the purpose of cloning the synthetic gene into a vector, for example, a protein expression vector or a vector designed for the amplification of the core protein coding DNA sequences. Furthermore, additional nucleotide sequences specifying functional DNA elements can be operatively linked to a polypeptide-encoding nucleic acid molecule. Examples of such sequences include, but are not limited to, promoter sequences designed to facilitate intracellular protein expression, and secretion sequences, for example heterologous signal sequences, designed to facilitate protein secretion. Such sequences are known to those of skill in the art. For example, exemplary heterologous signal sequences include, but are not limited to, human kappa IgG heterologous signal sequence set forth in SEQ ID NO:2. Additional nucleotide residues sequences such as sequences of bases specifying protein binding regions also can be linked to enzyme-encoding nucleic acid molecules. Such regions include, but are not limited to, sequences of residues that facilitate or encode proteins that facilitate uptake of an enzyme into specific target cells, or otherwise alter pharmacokinetics of a product of a synthetic gene. For example, enzymes can be linked to PEG moieties.

[0311] In addition, tags or other moieties can be added, for example, to aid in detection or affinity purification of the polypeptide. For example, additional nucleotide residues sequences such as sequences of bases specifying an epitope tag or other detectable marker also can be linked to enzyme-encoding nucleic acid molecules. Exemplary of such sequences include nucleic acid sequences encoding a His tag (e.g., 6×His, HHHHHH; SEQ ID NO:235) or Flag Tag (DYKDDDDK; SEQ ID NO:236).

[0312] The identified and isolated nucleic acids can then be inserted into an appropriate cloning vector. A large number of vector-host systems known in the art can be used. Possible vectors include, but are not limited to, plasmids or modified viruses, but the vector system must be compatible with the host cell used. Such vectors include, but are not limited to, bacteriophages such as lambda derivatives, or plasmids such as pCMV4, pBR322 or pUC plasmid derivatives or the Bluescript vector (Stratagene, La Jolla, Calif.). Other expression vectors include the HZ24 expression vector exemplified herein. The insertion into a cloning vector can, for example, be accomplished by ligating the DNA fragment into a cloning vector which has complementary cohesive termini. Insertion can be effected using TOPO cloning vectors (Invitrogen, Carlsbad, Calif.). If the complementary restriction sites used to fragment the DNA are not present in the cloning vector, the ends of the DNA molecules can be enzymatically modified. Alternatively, any site desired can be produced by ligating nucleotide sequences (linkers) onto the DNA termini; these ligated linkers can contain specific chemically synthesized oligonucleotides encoding restriction endonuclease recognition sequences. In an alternative method, the cleaved vector and protein gene can be modified by homopolymeric tailing. Recombinant molecules can be introduced into host cells via, for example, transformation, transfection, infection, electroporation and sonoporation, so that many copies of the gene sequence are generated.

[0313] In specific embodiments, transformation of host cells with recombinant DNA molecules that incorporate the isolated protein gene, cDNA, or synthesized DNA sequence enables generation of multiple copies of the gene. Thus, the gene can be obtained in large quantities by growing transformants, isolating the recombinant DNA molecules from the transformants and, when necessary, retrieving the inserted gene from the isolated recombinant DNA.

[0314] 1. Vectors and Cells

[0315] For recombinant expression of one or more of the desired proteins, such as any described herein, the nucleic acid containing all or a portion of the nucleotide sequence encoding the protein can be inserted into an appropriate expression vector, i.e., a vector that contains the necessary elements for the transcription and translation of the inserted protein coding sequence. The necessary transcriptional and translational signals also can be supplied by the native promoter for enzyme genes, and/or their flanking regions.

[0316] Also provided are vectors that contain a nucleic acid encoding the enzyme. Cells containing the vectors also are provided. The cells include eukaryotic and prokaryotic cells, and the vectors are any suitable for use therein.

[0317] Prokaryotic and eukaryotic cells, including endothelial cells, containing the vectors are provided. Such cells include bacterial cells, yeast cells, fungal cells, Archea, plant cells, insect cells and animal cells. The cells are used to produce a protein thereof by growing the above-described cells under conditions whereby the encoded protein is expressed by the cell, and recovering the expressed protein. For purposes herein, for example, the enzyme can be secreted into the medium.

[0318] Provided are vectors that contain a sequence of nucleotides that encodes the proenzyme polypeptide coupled to the native or heterologous signal sequence, as well as multiple copies thereof. The vectors can be selected for expression of the enzyme protein in the cell or such that the enzyme protein is expressed as a secreted protein. The proenzyme (i.e. zymogen) form of the enzyme can be purified for use as a activatable enzyme herein. Alternatively, upon secretion the prosegment can be cleaved catalytically or autocatalytically to generate a mature enzyme. If necessary, the enzyme can be purified such that the prosegment is removed from the preparation. Such mature forms, if inactive, also can be used herein as activatable enzyme either in a single chain or two-chain form.

[0319] A variety of host-vector systems can be used to express the protein coding sequence. These include but are not limited to mammalian cell systems infected with virus (e.g. vaccinia virus, adenovirus and other viruses); insect cell systems infected with virus (e.g. baculovirus); microorganisms such as yeast containing yeast vectors; or bacteria transformed with bacteriophage, DNA, plasmid DNA, or cosmid DNA. The expression elements of vectors vary in their strengths and specificities. Depending on the host-vector system used, any one of a number of suitable transcription and translation elements can be used.

[0320] Any methods known to those of skill in the art for the insertion of DNA fragments into a vector can be used to construct expression vectors containing a chimeric gene containing appropriate transcriptional/translational control signals and protein coding sequences. These methods can include in vitro recombinant DNA and synthetic techniques and in vivo recombinants (genetic recombination). Expression of nucleic acid sequences encoding protein, or domains, derivatives, fragments or homologs thereof, can be regulated by a second nucleic acid sequence so that the genes or fragments thereof are expressed in a host transformed with the recombinant DNA molecule(s). For example, expression of the proteins can be controlled by any promoter/enhancer known in the art. In a specific embodiment, the promoter is not native to the genes for a desired protein. Promoters which can be used include but are not limited to the SV40 early promoter (Bemoist and Chambon, Nature 290:304-310 (1981)), the promoter contained in the 3′ long terminal repeat of Rous sarcoma virus (Yamamoto et al. Cell 22:787-797 (1980)), the herpes thymidine kinase promoter (Wagner et al., Proc. Natl. Acad. Sci. USA 78:1441-1445 (1981)), the regulatory sequences of the metallothionein gene (Brinster et al., Nature 296:39-42 (1982)); prokaryotic expression vectors such as the β-lactamase promoter (Jay et al., (1981) Proc. Natl. Acad. Sci. USA 78:5543) or the tac promoter (DeBoer et al., Proc. Natl. Acad. Sci. USA 80:21-25 (1983)); see also “Useful Proteins from Recombinant Bacteria”: in Scientific American 242:79-94 (1980)); plant expression vectors containing the nopaline synthetase promoter (Herrar-Estrella et al., Nature 303:209-213 (1984)) or the cauliflower mosaic virus 35S RNA promoter (Gardner et al., Nucleic Acids Res. 9:2871 (1981)), and the promoter of the photosynthetic enzyme ribulose bisphosphate carboxylase (Herrera-Estrella et al., Nature 310:115-120 (1984)); promoter elements from yeast and other fungi such as the Ga14 promoter, the alcohol dehydrogenase promoter, the phosphoglycerol kinase promoter, the alkaline phosphatase promoter, and the following animal transcriptional control regions that exhibit tissue specificity and have been used in transgenic animals: elastase I gene control region which is active in pancreatic acinar cells (Swift et al., Cell 38:639-646 (1984); Ornitz et al., Cold Spring Harbor Symp. Quant. Biol. 50:399-409 (1986); MacDonald, Hepatology 7:425-515 (1987)); insulin gene control region which is active in pancreatic beta cells (Hanahan et al., Nature 315:115-122 (1985)), immunoglobulin gene control region which is active in lymphoid cells (Grosschedl et al., Cell 38:647-658 (1984); Adams et al., Nature 318:533-538 (1985); Alexander et al., Mol. Cell Biol. 7:1436-1444 (1987)), mouse mammary tumor virus control region which is active in testicular, breast, lymphoid and mast cells (Leder et al., Cell 45:485-495 (1986)), albumin gene control region which is active in liver (Pinckert et al., Genes and Devel. 1:268-276 (1987)), alpha-fetoprotein gene control region which is active in liver (Krumlauf et al., Mol. Cell. Biol. 5:1639-1648 (1985); Hammer et al., Science 235:53-58 1987)), alpha-1 antitrypsin gene control region which is active in liver (Kelsey et al., Genes and Devel. 1:161-171 (1987)), beta globin gene control region which is active in myeloid cells (Magram et al., Nature 315:338-340 (1985); Kollias et al., Cell 46:89-94 (1986)), myelin basic protein gene control region which is active in oligodendrocyte cells of the brain (Readhead et al., Cell 48:703-712 (1987)), myosin light chain-2 gene control region which is active in skeletal muscle (Shani, Nature 314:283-286 (1985)), and gonadotrophic releasing hormone gene control region which is active in gonadotrophs of the hypothalamus (Mason et al., Science 234:1372-1378 (1986)).

[0321] In a specific embodiment, a vector is used that contains a promoter operably linked to nucleic acids encoding a desired protein, or a domain, fragment, derivative or homolog, thereof, one or more origins of replication, and optionally, one or more selectable markers (e.g., an antibiotic resistance gene). Exemplary plasmid vectors for transformation of E. coli cells, include, for example, the pQE expression vectors (available from Qiagen, Valencia, Calif.; see also literature published by Qiagen describing the system). pQE vectors have a phage T5 promoter (recognized by E. coli RNA polymerase) and a double lac operator repression module to provide tightly regulated, high-level expression of recombinant proteins in E. coli, a synthetic ribosomal binding site (RBS II) for efficient translation, a 6×His tag coding sequence, t₀ and T1 transcriptional terminators, ColE1 origin of replication, and a beta-lactamase gene for conferring ampicillin resistance. The pQE vectors enable placement of a 6×His tag at either the N- or C-terminus of the recombinant protein. Such plasmids include pQE 32, pQE 30, and pQE 31 which provide multiple cloning sites for all three reading frames and provide for the expression of N-terminally 6×His-tagged proteins. Other exemplary plasmid vectors for transformation of E. coli cells, include, for example, the pET expression vectors (see, U.S. Pat. No. 4,952,496; available from Novagen, Madison, Wis.; see, also literature published by Novagen describing the system). Such plasmids include pET 11a, which contains the T7lac promoter, T7 terminator, the inducible E. coli lac operator, and the lac repressor gene; pET 12a-c, which contains the T7 promoter, T7 terminator, and the E. coli ompT secretion signal; and pET 15b and pET19b (NOVAGEN, Madison, Wis.), which contain a His-Tag™ leader sequence for use in purification with a His column and a thrombin cleavage site that permits cleavage following purification over the column, the T7-lac promoter region and the T7 terminator.

[0322] Exemplary of a vector for mammalian cell expression is the HZ24 expression vector. The HZ24 expression vector was derived from the pCI vector backbone (Promega). It contains DNA encoding the Beta-lactamase resistance gene (AmpR), an F1 origin of replication, a Cytomegalovirus immediate-early enhancer/promoter region (CMV), and an SV40 late polyadenylation signal (SV40). The expression vector also has an internal ribosome entry site (IRES) from the ECMV virus (Clontech) and the mouse dihydrofolate reductase (DHFR) gene.

[0323] 2. Expression

[0324] Matrix-degrading enzymes can be produced by any method known to those of skill in the art including in vivo and in vitro methods. Desired proteins can be expressed in any organism suitable to produce the required amounts and forms of the proteins, such as for example, needed for administration and treatment. Expression hosts include prokaryotic and eukaryotic organisms such as E. coli, yeast, plants, insect cells, mammalian cells, including human cell lines and transgenic animals. Expression hosts can differ in their protein production levels as well as the types of post-translational modifications that are present on the expressed proteins. The choice of expression host can be made based on these and other factors, such as regulatory and safety considerations, production costs and the need and methods for purification.

[0325] Many expression vectors are available and known to those of skill in the art and can be used for expression of proteins. The choice of expression vector will be influenced by the choice of host expression system. In general, expression vectors can include transcriptional promoters and optionally enhancers, translational signals, and transcriptional and translational termination signals. Expression vectors that are used for stable transformation typically have a selectable marker which allows selection and maintenance of the transformed cells. In some cases, an origin of replication can be used to amplify the copy number of the vector.

[0326] Matrix-degrading enzymes also can be utilized or expressed as protein fusions. For example, an enzyme fusion can be generated to add additional functionality to an enzyme. Examples of enzyme fusion proteins include, but are not limited to, fusions of a signal sequence, a tag such as for localization, e.g. a his₆ tag or a myc tag, or a tag for purification, for example, a GST fusion, and a sequence for directing protein secretion and/or membrane association.

[0327] Generally, matrix-degrading enzymes are expressed in an inactive zymogen form. Zymogen conversion can be achieved by exposure to other proteases or to autocatalysis to generate a mature enzyme. Any form of an enzyme is contemplated herein, so long as it is inactive in the absence of an activator.

[0328] a. Prokaryotic Cells

[0329] Prokaryotes, especially E. coli, provide a system for producing large amounts of proteins. Transformation of E. coli is simple and rapid technique well known to those of skill in the art. Expression vectors for E. coli can contain inducible promoters, such promoters are useful for inducing high levels of protein expression and for expressing proteins that exhibit some toxicity to the host cells. Examples of inducible promoters include the lac promoter, the trp promoter, the hybrid tac promoter, the T7 and SP6 RNA promoters and the temperature regulated APL promoter.

[0330] Proteins, such as any provided herein, can be expressed in the cytoplasmic environment of E. coli. The cytoplasm is a reducing environment and for some molecules, this can result in the formation of insoluble inclusion bodies. Reducing agents such as dithiothreitol and β-mercaptoethanol and denaturants, such as guanidine-HCl and urea can be used to resolubilize the proteins. An alternative approach is the expression of proteins in the periplasmic space of bacteria which provides an oxidizing environment and chaperonin-like and disulfide isomerases and can lead to the production of soluble protein. Typically, a leader sequence is fused to the protein to be expressed which directs the protein to the periplasm. The leader is then removed by signal peptidases inside the periplasm. Examples of periplasmic-targeting leader sequences include the pelB leader from the pectate lyase gene and the leader derived from the alkaline phosphatase gene. In some cases, periplasmic expression allows leakage of the expressed protein into the culture medium. The secretion of proteins allows quick and simple purification from the culture supernatant. Proteins that are not secreted can be obtained from the periplasm by osmotic lysis. Similar to cytoplasmic expression, in some cases proteins can become insoluble and denaturants and reducing agents can be used to facilitate solubilization and refolding. Temperature of induction and growth also can influence expression levels and solubility, typically temperatures between 25° C. and 37° C. are used. Typically, bacteria produce aglycosylated proteins. Thus, if proteins require glycosylation for function, glycosylation can be added in vitro after purification from host cells.

[0331] b. Yeast Cells

[0332] Yeasts such as Saccharomyces cerevisae, Schizosaccharomyces pombe, Yarrowia lipolytica, Kluyveromyces lactis and Pichia pastoris are well known yeast expression hosts that can be used for production of proteins, such as any described herein. Yeast can be transformed with episomal replicating vectors or by stable chromosomal integration by homologous recombination. Typically, inducible promoters are used to regulate gene expression. Examples of such promoters include GAL1, GAL7 and GAL5 and metallothionein promoters, such as CUP1, AOX1 or other Pichia or other yeast promoter. Expression vectors often include a selectable marker such as LEU2, TRP1, HIS3 and URA3 for selection and maintenance of the transformed DNA. Proteins expressed in yeast are often soluble. Co-expression with chaperonins such as Bip and protein disulfide isomerase can improve expression levels and solubility. Additionally, proteins expressed in yeast can be directed for secretion using secretion signal peptide fusions such as the yeast mating type alpha-factor secretion signal from Saccharomyces cerevisae and fusions with yeast cell surface proteins such as the Aga2p mating adhesion receptor or the Arxula adeninivorans glucoamylase. A protease cleavage site such as for the Kex-2 protease, can be engineered to remove the fused sequences from the expressed polypeptides as they exit the secretion pathway. Yeast also is capable of glycosylation at Asn-X-Ser/Thr motifs.

[0333] c. Insect Cells

[0334] Insect cells, particularly using baculovirus expression, are useful for expressing polypeptides such as matrix-degrading enzymes. Insect cells express high levels of protein and are capable of most of the post-translational modifications used by higher eukaryotes. Baculovirus have a restrictive host range which improves the safety and reduces regulatory concerns of eukaryotic expression. Typical expression vectors use a promoter for high level expression such as the polyhedrin promoter of baculovirus. Commonly used baculovirus systems include the baculoviruses such as Autographa californica nuclear polyhedrosis virus (AcNPV), and the Bombyx mori nuclear polyhedrosis virus (BmNPV) and an insect cell line such as Sf9 derived from Spodoptera frugiperda, Pseudaletia unipuncta (A7S) and Danaus plexippus (DpN1). For high-level expression, the nucleotide sequence of the molecule to be expressed is fused immediately downstream of the polyhedrin initiation codon of the virus. Mammalian secretion signals are accurately processed in insect cells and can be used to secrete the expressed protein into the culture medium. In addition, the cell lines Pseudaletia unipuncta (A7S) and Danaus plexippus (DpN1) produce proteins with glycosylation patterns similar to mammalian cell systems.

[0335] An alternative expression system in insect cells is the use of stably transformed cells. Cell lines such as the Schneider 2 (S2) and Kc cells (Drosophila melanogaster) and C7 cells (Aedes albopictus) can be used for expression. The Drosophila metallothionein promoter can be used to induce high levels of expression in the presence of heavy metal induction with cadmium or copper. Expression vectors are typically maintained by the use of selectable markers such as neomycin and hygromycin.

[0336] d. Mammalian Cells

[0337] Mammalian expression systems can be used to express proteins including matrix-degrading enzymes. Expression constructs can be transferred to mammalian cells by viral infection such as adenovirus or by direct DNA transfer such as liposomes, calcium phosphate, DEAE-dextran and by physical means such as electroporation and microinjection. Expression vectors for mammalian cells typically include an mRNA cap site, a TATA box, a translational initiation sequence (Kozak consensus sequence) and polyadenylation elements. IRES elements also can be added to permit bicistronic expression with another gene, such as a selectable marker. Such vectors often include transcriptional promoter-enhancers for high-level expression, for example the SV40 promoter-enhancer, the human cytomegalovirus (CMV) promoter and the long terminal repeat of Rous sarcoma virus (RSV). These promoter-enhancers are active in many cell types. Tissue and cell-type promoters and enhancer regions also can be used for expression. Exemplary promoter/enhancer regions include, but are not limited to, those from genes such as elastase I, insulin, immunoglobulin, mouse mammary tumor virus, albumin, alpha fetoprotein, alpha 1 antitrypsin, beta globin, myelin basic protein, myosin light chain 2, and gonadotropic releasing hormone gene control. Selectable markers can be used to select for and maintain cells with the expression construct. Examples of selectable marker genes include, but are not limited to, hygromycin B phosphotransferase, adenosine deaminase, xanthine-guanine phosphoribosyl transferase, aminoglycoside phosphotransferase, dihydrofolate reductase (DHFR) and thymidine kinase. For example, expression can be performed in the presence of methotrexate to select for only those cells expressing the DHFR gene. Fusion with cell surface signaling molecules such as TCR-ζ and Fc_{ε}RI-γ can direct expression of the proteins in an active state on the cell surface.

[0338] Many cell lines are available for mammalian expression including mouse, rat human, monkey, chicken and hamster cells. Exemplary cell lines include but are not limited to CHO, Balb/3T3, HeLa, MT2, mouse NS0 (nonsecreting) and other myeloma cell lines, hybridoma and heterohybridoma cell lines, lymphocytes, fibroblasts, Sp2/0, COS, NIH3T3, HEK293, 293S, 2B8, and HKB cells. Cell lines also are available adapted to serum-free media which facilitates purification of secreted proteins from the cell culture media. Examples include CHO-S cells (Invitrogen, Carlsbad, Calif., cat #11619-012) and the serum free EBNA-1 cell line (Pham et al., (2003) Biotechnol. Bioeng. 84:332-42.). Cell lines also are available that are adapted to grow in special mediums optimized for maximal expression. For example, DG44 CHO cells are adapted to grow in suspension culture in a chemically defined, animal product-free medium.

[0339] e. Plants

[0340] Transgenic plant cells and plants can be used to express proteins such as any described herein. Expression constructs are typically transferred to plants using direct DNA transfer such as microprojectile bombardment and PEG-mediated transfer into protoplasts, and with agrobacterium-mediated transformation. Expression vectors can include promoter and enhancer sequences, transcriptional termination elements and translational control elements. Expression vectors and transformation techniques are usually divided between dicot hosts, such as Arabidopsis and tobacco, and monocot hosts, such as corn and rice. Examples of plant promoters used for expression include the cauliflower mosaic virus promoter, the nopaline synthetase promoter, the ribose bisphosphate carboxylase promoter and the ubiquitin and UBQ3 promoters. Selectable markers such as hygromycin, phosphomannose isomerase and neomycin phosphotransferase are often used to facilitate selection and maintenance of transformed cells. Transformed plant cells can be maintained in culture as cells, aggregates (callus tissue) or regenerated into whole plants. Transgenic plant cells also can include algae engineered to produce matrix-degrading enzymes. Because plants have different glycosylation patterns than mammalian cells, this can influence the choice of protein produced in these hosts.

[0341] 3. Purification Techniques

[0342] Method for purification of polypeptides, including matrix-degrading enzymes or other proteins, from host cells will depend on the chosen host cells and expression systems. For secreted molecules, proteins are generally purified from the culture media after removing the cells. For intracellular expression, cells can be lysed and the proteins purified from the extract. When transgenic organisms such as transgenic plants and animals are used for expression, tissues or organs can be used as starting material to make a lysed cell extract. Additionally, transgenic animal production can include the production of polypeptides in milk or eggs, which can be collected, and if necessary, the proteins can be extracted and further purified using standard methods in the art.

[0343] Generally, matrix-degrading enzymes are expressed and purified to be in an inactive form (zymogen form) for subsequent activation as described in the systems and methods provided herein. In some applications, matrix-degrading enzymes are inactive in their mature form in the absence of an activator as described herein. Hence, following expression, mature forms can be generated by autocatalysis to remove the prosegment. For many enzymes, the autocatalysis requires the presence of the activator. If necessary, additional purification steps can be performed to remove the prosegment from the purified preparation. In some circumstances, such as for use as controls, expressed matrix-degrading enzymes can be purified into an active form, by autocatalysis to remove the prosegment or by addition of an activator. In such examples, autoactivation can occur during the purification process, or by incubating at room temperature for 24-72 hours. The rate and degree of activation is dependent on protein concentration and the specific enzyme, such that for example, a more dilute sample may need to be incubated at room temperature for a longer period of time. Activation can be monitored by SDS-PAGE (e.g., a 3 kilodalton shift) and by enzyme activity (cleavage of a fluorogenic substrate). Where an active enzyme is desired, typically, an enzyme is allowed to achieve >75% activation before purification.

[0344] Proteins, such as matrix-degrading enzymes, can be purified using standard protein purification techniques known in the art including but not limited to, SDS-PAGE, size fraction and size exclusion chromatography, ammonium sulfate precipitation and ionic exchange chromatography, such as anion exchange. Affinity purification techniques also can be utilized to improve the efficiency and purity of the preparations. For example, antibodies, receptors and other molecules that bind matrix-degrading enzymes can be used in affinity purification. Expression constructs also can be engineered to add an affinity tag to a protein such as a myc epitope, GST fusion or His₆ and affinity purified with myc antibody, glutathione resin and Ni-resin, respectively. Purity can be assessed by any method known in the art including gel electrophoresis and staining and spectrophotometric techniques.

### F. PREPARATION, FORMULATION AND ADMINISTRATION OF ACTIVATABLE MATRIX-DEGRADING ENZYMES

[0345] The pharmaceutical compositions provided herein contain activatable matrix-degrading enzymes provided in an inactive form. Also provided are compositions containing an activator. The compounds can be formulated into suitable pharmaceutical preparations such as solutions, suspensions, gels, tablets, dispersible tablets, pills, capsules, powders, sustained release formulations or elixirs, for oral, parenteral administrate, as well as transdermal patch preparation and dry powder inhalers. Typically, the compounds are formulated into pharmaceutical compositions using techniques and procedures well known in the art (see e.g., Ansel Introduction to Pharmaceutical Dosage Forms, Fourth Edition, 1985, 126).

[0346] A selected matrix-degrading enzyme is included in an amount sufficient that, when activated, exert a therapeutically useful effect in the absence of undesirable side effects on the patient treated. The composition containing the activatable matrix-degrading enzyme can include a pharmaceutically acceptable carrier. Therapeutically effective concentration can be determined empirically by testing the compounds in known in vitro and in vivo systems, such as the assays provided herein. The concentration of a selected matrix-degrading enzyme in the composition depends on absorption, inactivation and excretion rates of the complex, the physicochemical characteristics of the complex, the dosage schedule, and amount administered as well as other factors known to those of skill in the art. For example, it is understood that the precise dosage and duration of treatment is a function of the tissue being treated and may be determined empirically using known testing protocols or by extrapolation from in vivo or in vitro test data. It is to be noted that concentrations and dosage values may also vary with the age of the individual treated. It is to be further understood that for any particular subject, specific dosage regimens should be adjusted over time according to the individual need and the professional judgment of the person administering or supervising the administration of the formulations, and that the concentration ranges set forth herein are exemplary only and are not intended to limit the scope thereof. The amount of a selected matrix-degrading enzyme to be administered for the treatment of a disease or condition, for example an ECM-mediated disease or condition such as cellulite or lymphedema, can be determined by standard clinical techniques. In addition, in vitro assays and animal models can be employed to help identify optimal dosage ranges. The precise dosage, which can be determined empirically, can depend on the particular enzyme, the route of administration, the type of disease to be treated and the seriousness of the disease. Exemplary dosages range from or about 10 μg to 100 mg, particularly 50 μg to 75 mg, 100 μg to 50 mg, 250 μg to 25 mg, 500 μg to 10 mg, 1 mg to 5 mg, or 2 mg to 4 mg. The particular dosage and formulation thereof depends upon the indication and individual. If necessary dosage can be empirically determined. Typically the dosage is administered for indications described herein in a volume of 1-100 ml, particularly, 1-50 ml, 10-50 ml, 10-30 ml, 1-20 ml, or 1-10 ml volumes following reconstitution, such as by addition of an activator. Typically, such dosages are from at or about 100 μg to 50 mg, generally 1 mg to 5 mg, in a 10-50 ml final volume.

[0347] A selected activator typically is provided as a buffered solution in an amount that, when exposed to the matrix-degrading enzyme, activates the matrix-degrading enzyme. Typically, the amount of activator in the buffer is one that temporarily alters the physiological amounts of that activator present in the interstitium to a level sufficient to temporarily activate the selected activatable matrix-degrading enzyme. For example, where acidic pH is the activating condition, the activator in the form of an acidic buffer composition contains at least one acid, that when administered to the ECM, together or separate from the matrix-degrading enzyme, temporarily lowers the pH of the ECM below physiological pH, i.e. below neutrality. As described elsewhere herein, the acidic buffer is one that has an effective pH range within the pH optima of the selected enzyme. Neutralization of the acidic buffer will occur upon administration due to the neutral pH environment of the interstitium, and is a function of the buffering capacity. Other buffered solutions also are contemplated herein depending on the selected activatable matrix-degrading enzyme and activator chosen. For example, buffers can be prepared at varying temperatures, or with varying amounts of salt, reducing agent, or metal ions. The buffered activator solution containing the low pH activating condition also can contain a pharmaceutically acceptable carrier or excipient.

[0348] A matrix degrading enzyme can be administered at once, or can be divided into a number of smaller doses to be administered at intervals of time. Selected matrix-degrading enzymes can be administered in one or more doses over the course of a treatment time for example over several hours, days, weeks, or months. In some cases, continuous administration is useful. It is understood that the precise dosage and course of administration depends on the methods and system of activation contemplated. For example, the matrix degrading enzyme can be administered together or separate from the activator. Typically, if administered together, the activator is exposed to the matrix-degrading enzyme just prior to use, for example, by reconstitution of a lyophilized powder. In other presentations, the activator can be a component of the AMDE formulation or can be mixed with a liquid-based dosage form of the AMDE. Also, the AMDE can be diluted with an appropriate diluent prior to mixing the activator. If administered separately, the matrix-degrading enzyme composition can be administered sequentially, simultaneously or intermittently from the activator preparation.

[0349] Also, it is understood that the precise dosage and duration of treatment is a function of the disease being treated and can be determined empirically using known testing protocols or by extrapolation from in vivo or in vitro test data. It is to be noted that concentrations and dosage values also can vary with the severity of the condition to be alleviated. It is to be further understood that for any particular subject, specific dosage regimens should be adjusted over time according to the individual need and the professional judgment of the person administering or supervising the administration of the compositions, and that the concentration ranges set forth herein are exemplary only and are not intended to limit the scope or use of compositions and combinations containing them. The compositions can be administered hourly, daily, weekly, monthly, yearly or once. Generally, dosage regimens are chosen to limit toxicity. It should be noted that the attending physician would know how to and when to terminate, interrupt or adjust therapy to lower dosage due to toxicity, or bone marrow, liver or kidney or other tissue dysfunctions. Conversely, the attending physician would also know how to and when to adjust treatment to higher levels if the clinical response is not adequate (precluding toxic side effects).

[0350] Pharmaceutically acceptable compositions are prepared in view of approvals for a regulatory agency or other agency prepared in accordance with generally recognized pharmacopeia for use in animals and in humans. Compositions can take the form of solutions, suspensions, emulsion, gels, tablets, pills, capsules, powders, and sustained release formulations. A composition can be formulated as a suppository, with traditional binders and carriers such as triglycerides. Oral formulation can include standard carriers such as pharmaceutical grades of mannitol, lactose, starch, magnesium stearate, sodium saccharine, cellulose, magnesium carbonate, and other such agents. The formulation should suit the mode of administration.

[0351] Pharmaceutical compositions can include carriers such as a diluent, adjuvant, excipient, or vehicle with which an enzyme or activator is administered. Examples of suitable pharmaceutical carriers are described in “Remington's Pharmaceutical Sciences” by E. W. Martin. Such compositions will contain a therapeutically effective amount of the compound, generally in purified form, together with a suitable amount of carrier so as to provide the form for proper administration to the patient. Such pharmaceutical carriers can be sterile liquids, such as water and oils, including those of petroleum, animal, vegetable or synthetic origin, such as peanut oil, soybean oil, mineral oil, and sesame oil. Water is a typical carrier when the pharmaceutical composition is administered intravenously. Saline solutions and aqueous dextrose and glycerol solutions also can be employed as liquid carriers, particularly for injectable solutions. Compositions can contain along with an active ingredient: a diluent such as saline, lactose, sucrose, dextrose, Ringers lactate, dicalcium phosphate, or carboxymethylcellulose; a lubricant, such as magnesium stearate, calcium stearate and talc; and a binder such as starch, natural gums, such as gum acacia gelatin, glucose, molasses, polyinylpyrrolidine, celluloses and derivatives thereof, povidone, crospovidones and other such binders known to those of skill in the art. Suitable pharmaceutical excipients include starch, glucose, lactose, sucrose, maltose, mannose, trehalose, mannitol, sorbitol, gelatin, malt, rice, flour, chalk, silica gel, sodium stearate, glycerol monostearate, talc, sodium chloride, dried skim milk, glycerol, propylene glycol, water, and ethanol. A composition, if desired, also can contain minor amounts of wetting or emulsifying agents, or pH buffering agents, for example, acetate, sodium citrate, maleate, glycinate, histidine, succinate, lactate, cyclodextrin derivatives, sorbitan monolaurate, triethanolamine sodium acetate, triethanolamine oleate, poly ethylene glycol and other such agents. Other excipients in the formulation can include oxidixing or reducing agents such as cysteine, oxidized glutathione or cysteine, reduced glutathione; surfactants such as polysorbate 80, polysorbate 20, pluronic (F68), or preservatives. As noted, for purposes herein, acidic buffering agents can be provided as activators, which generally are provided in combinations separate from the matrix-degrading enzyme until use.

[0352] Reducing agents can increase the activity of matrix-degrading enzymes, and therefore can be provided in formulations for administration. For example, a reducing agent is required to assay enzyme activity using a fluorogenic peptide substrate (see e.g. Example 25). Also, a reducing agent increases the activity of cathepsin L for substrates such as collagen, HSA and a PH20 composition designated rHuPH20 (see e.g. Example 26). Exemplary reducing agents include, but are not limited to, cysteine or TCEP (tris(2-carboxyethyl)phosphine). Generally, a reducing agent is not included in a liquid formulation for long term storage because this can enhance the auto degradation and make the formulation less stable. It is contemplated herein that a reducing agent is added to a liquid dosage form or is added to reconstitute a lyophilized form of an enzyme prior to use, generally immediately prior to use. For example, a lyophilized enzyme, such as cathepsin L, can be reconstituted with a diluent containing a reducing agent. Alternatively, an enzyme can be formulated as a lyophilized enzyme containing a reducing agent present in the formulation, so long as the resulting protein retains stability of one to two years. In such a formulation, the lyophilized enzyme is reconstituted in a suitable diluent without reducing agent. The amount of reducing agent can be empirically determined and is a function of the particular reducing agent. Exemplary amounts for single dosage administration are from about 1 mM to 30 mM, for example, 1 mM, 2 mM, 5 mM, 6 mM, 7 mM, 8 mM, 9 mM, 10 mM, 15 mM, 20 mM, 25 mM or 30 mM.

[0353] Formulations are provided for administration to humans and animals in unit dosage forms, such as tablets, capsules, pills, powders, granules, sterile parenteral solutions or suspensions, and oral solutions or suspensions, and oil water emulsions containing suitable quantities of the compounds or pharmaceutically acceptable derivatives thereof. Pharmaceutically therapeutically active compounds and derivatives thereof are typically formulated and administered in unit dosage forms or multiple dosage forms. Each unit dose contains a predetermined quantity of therapeutically active compound sufficient to produce the desired therapeutic effect, in association with the required pharmaceutical carrier, vehicle or diluent. Examples of unit dose forms include ampoules, vials and syringes and individually packaged tablets or capsules. Unit dose forms can be administered in fractions or multiples thereof. A multiple dose form is a plurality of identical unit dosage forms packaged in a single container to be administered in segregated unit dose form. Examples of multiple dose forms include vials, bottles of tablets or capsules or bottles of pints or gallons. Hence, multiple dose form is a multiple of unit doses that are not segregated in packaging. Generally, dosage forms or compositions containing active ingredient in the range of 0.005% to 100% with the balance made up from non-toxic carrier can be prepared.

[0354] Compositions can be formulated for administration by any route known to those of skill in the art including intramuscular, intravenous, intradermal, intralesional, intraperitoneal injection, subcutaneous, sub-epidermal, epidural, nasal, oral, vaginal, rectal, topical, local, otic, inhalational, buccal (e.g., sublingual), and transdermal administration or any route. Administration can be local, topical or systemic depending upon the locus of treatment. Local administration to an area in need of treatment can be achieved by, for example, but not limited to, local infusion during surgery, topical application, e.g., in conjunction with a wound dressing after surgery, by injection, by means of a catheter, by means of a suppository, or by means of an implant. Compositions also can be administered with other biologically active agents, either sequentially, intermittently or in the same composition. Administration also can include controlled release systems including controlled release formulations and device controlled release, such as by means of a pump.

[0355] The most suitable route in any given case depends on a variety of factors, such as the nature of the disease, the progress of the disease, the severity of the disease the particular composition which is used. For purposes herein, it is desired that matrix-degrading enzymes and activator are administered so that they reach the interstitium of skin or tissues. Thus, direct administration under the skin, such as by sub-epidermal administration methods, is contemplated. These include, for example, subcutaneous, intradermal and intramuscular routes of administration. Thus, in one example, local administration can be achieved by injection, such as from a syringe or other article of manufacture containing a injection device such as a needle. Other modes of administration also are contemplated. Pharmaceutical composition can be formulated in dosage forms appropriate for each route of administration.

[0356] In one example, pharmaceutical preparation can be in liquid form, for example, solutions, syrups or suspensions. If provided in liquid form, the pharmaceutical preparation of an activatable matrix-degrading enzyme can be provided as a concentrated preparation to be diluted to a therapeutically effective concentration upon addition of the activator. The activator can be added to the preparation prior to administration, or the activator can be added simultaneously, intermittently or sequentially with the matrix-degrading enzyme preparation. Such liquid preparations can be prepared by conventional means with pharmaceutically acceptable additives such as suspending agents (e.g., sorbitol syrup, cellulose derivatives or hydrogenated edible fats); emulsifying agents (e.g., lecithin or acacia); non-aqueous vehicles (e.g., almond oil, oily esters, or fractionated vegetable oils); and preservatives (e.g., methyl or propyl-p-hydroxybenzoates or sorbic acid).

[0357] In another example, pharmaceutical preparations can be presented in lyophilized form for reconstitution with water or other suitable vehicle before use. For example, the pharmaceutical preparations of matrix-degrading enzymes can be reconstituted with a solution containing an appropriate activator. Reconstitution of the preparation yields a mixture containing a therapeutically effective amount of matrix-degrading enzyme in a suitable activator, that can be administered together using any desired route of administration.

[0358] Administration methods can be employed to decrease the exposure of selected matrix-degrading enzymes to degradative processes, such as proteolytic degradation and immunological intervention via antigenic and immunogenic responses. Examples of such methods include local administration at the site of treatment. Pegylation of therapeutics has been reported to increase resistance to proteolysis, increase plasma half-life, and decrease antigenicity and immunogenicity. Examples of pegylation methodologies are known in the art (see for example, Lu and Felix, Int. J. Peptide Protein Res., 43: 127-138, 1994; Lu and Felix, Peptide Res., 6: 142-6, 1993; Felix et al., Int. J. Peptide Res., 46: 253-64, 1995; Benhar et al., J. Biol. Chem., 269: 13398-404, 1994; Brumeanu et al., J Immunol., 154: 3088-95, 1995; see also, Caliceti et al. (2003) Adv. Drug Deliv. Rev. 55(10):1261-77 and Molineux (2003) Pharmacotherapy 23 (8 Pt 2):3S-8S). Pegylation also can be used in the delivery of nucleic acid molecules in vivo. For example, pegylation of adenovirus can increase stability and gene transfer (see, e.g., Cheng et al. (2003) Pharm. Res. 20(9): 1444-51).

[0359] 1. Injectables, Solutions and Emulsions

[0360] Parenteral administration, generally characterized by injection, either subcutaneously, intramuscularly or intradermally is contemplated herein. Injectables can be prepared in conventional forms, either as liquid solutions or suspensions, solid forms suitable for solution or suspension in liquid prior to injection, or as emulsions. Suitable excipients are, for example, water, saline, dextrose, glycerol or ethanol. In addition, if desired, the pharmaceutical compositions to be administered may also contain an activator in the form of a solvent such as pH buffering agents, reducing or oxidizing agents, metal ion salts, or other such buffers. The pharmaceutical compositions also may contain other minor amounts of non-toxic auxiliary substances such as wetting or emulsifying agents, pH buffering agents, stabilizers, solubility enhancers, and other such agents, such as for example, sodium acetate, sorbitan monolaurate, triethanolamine oleate and cyclodextrins. Implantation of a slow-release or sustained-release system, such that a constant level of dosage is maintained (see, e.g., U.S. Pat. No. 3,710,795) is also contemplated herein. The percentage of active compound contained in such parenteral compositions is highly dependent on the specific nature thereof, as well as the activity of the compound and the needs of the subject.

[0361] Parenteral administration of the compositions generally includes sub-epidermal routes of administration such as intradermal, subcutaneous and intramuscular administrations. If desired, intravenous administration also is contemplated. Injectables are designed for local and systemic administration. For purposes herein, local administration is desired for direct administration to the affected interstitium. Preparations for parenteral administration include sterile solutions ready for injection, sterile dry soluble products, such as lyophilized powders, ready to be combined with a solvent just prior to use, including hypodermic tablets, sterile suspensions ready for injection, sterile dry insoluble products ready to be combined with a vehicle just prior to use and sterile mulsions. The solutions may be either aqueous or nonaqueous. If administered intravenously, suitable carriers include physiological saline or phosphate buffered saline (PBS), and solutions containing thickening and solubilizing agents, such as glucose, polyethylene glycol, and polypropylene glycol and mixtures thereof.

[0362] Pharmaceutically acceptable carriers used in parenteral preparations include aqueous vehicles, nonaqueous vehicles, antimicrobial agents, isotonic agents, buffers, antioxidants, local anesthetics, suspending and dispersing agents, emulsifying agents, sequestering or chelating agents, amino acids, peptides and other pharmaceutically acceptable substances. Examples of aqueous vehicles include Sodium Chloride Injection, Ringers Injection, Isotonic Dextrose Injection, Sterile Water Injection, Dextrose and Lactated Ringers Injection. Nonaqueous parenteral vehicles include fixed oils of vegetable origin, cottonseed oil, corn oil, sesame oil and peanut oil. Antimicrobial agents in bacteriostatic or fungistatic concentrations can be added to parenteral preparations packaged in multiple-dose containers, which include phenols or cresols, mercurials, benzyl alcohol, chlorobutanol, parabens such as methyl- and propyl-p-hydroxybenzoic acid esters, thimerosal, benzalkonium chloride and benzethonium chloride. Isotonic agents include sodium chloride and dextrose. Buffers include phosphate and citrate. Antioxidants include sodium bisulfate. Local anesthetics include procaine hydrochloride. Suspending and dispersing agents include sodium carboxymethylcelluose, hydroxypropyl methylcellulose and polyvinylpyrrolidone. Emulsifying agents include Polysorbate 80 (TWEEN 80), polysorbate 20 (TWEEN 20), pluronic (F68). A sequestering or chelating agent of metal ions includes EDTA. Pharmaceutical carriers also include ethyl alcohol, polyethylene glycol and propylene glycol for water miscible vehicles and sodium hydroxide, hydrochloric acid, citric acid or lactic acid for pH adjustment.

[0363] The concentration of the pharmaceutically active compound is adjusted so that an injection provides an effective amount to produce the desired pharmacological effect. The exact dose depends on the age, weight and condition of the patient or animal as is known in the art. The unit-dose parenteral preparations are packaged in an ampoule, a vial or a syringe with a needle. The volume of liquid solution or reconstituted powder preparation, containing the pharmaceutically active compound, is a function of the disease to be treated and the particular article of manufacture chosen for package. For example, for the treatment of cellulite, it is contemplated that for parenteral injection the injected volume is or is about 10 to 50 milliliters. Generally, this volume represents the volume of activator and matrix-degrading enzyme where the two are administered together. Thus, in one example, a dual container or dual-chamber syringe is provided containing a lyophilized enzyme preparation separated from a second compartment containing 10 to 50 milliliters of activator. Following reconstitution of the enzyme with the activator, the mixture can be administered. All preparations for parenteral administration must be sterile, as is known and practiced in the art. The injectable formulation can be stored under appropriate conditions such as at or about −80° C., −40° C., −20° C., 2-8° C., 15° C., room temperature or controlled room temperature.

[0364] Lyophilized Powders

[0365] Of interest herein are lyophilized powders, which can be reconstituted for administration as solutions, emulsions and other mixtures. They may also be reconstituted and formulated as solids or gels.

[0366] The sterile, lyophilized powder is prepared by dissolving a compound of inactive enzyme in a buffer solution. The buffer solution may contain an excipient which improves the stability or other pharmacological component of the powder or reconstituted solution, prepared from the powder. Subsequent sterile filtration of the solution followed by lyophilization under standard conditions known to those of skill in the art provides the desired formulation. Briefly, the lyophilized powder is prepared by dissolving an excipient, such as dextrose, sorbital, fructose, corn syrup, xylitol, glycerin, glucose, sucrose, mannose, sorbitol, trehalose, mannitol, sorbitol, hydroxyethyl starch or other suitable agent, in a suitable buffer, such as citrate, sodium or potassium phosphate or other such buffer known to those of skill in the art. Other excipients that can be added include amino acids such as glycine, alanine, proline, amines such as betaines, trimethylamine N-oxide, and salts of ammonium, sodium or magnesium. Then, a selected enzyme is added to the resulting mixture, and stirred until it dissolves. The resulting mixture is sterile filtered or treated to remove particulates and to insure sterility, and apportioned into vials for lyophilization. Each vial will contain a single dosage (1 mg-1 g, generally 1-100 mg, such as 1-5 mg) or multiple dosages of the compound. The lyophilized powder can be stored under appropriate conditions, such as at about 4° C. to room temperature.

[0367] Reconstitution of this lyophilized powder with a buffer solution provides a formulation for use in parenteral administration. The solution chosen for reconstitution can be any buffer, but typically is a buffer containing the activator. The activator is chosen as a function of the enzyme to be reconstituted. For example, a lyophilized preparation of cathepsin L is reconstituted with an acidic buffer at about pH 5.5. For reconstitution about 1 μg-20 mg, preferably 10 μg-1 mg, more preferably about 100 μg is added per mL of buffer or other suitable carrier. The precise amount depends upon the indication treated and selected compound. Such amount can be empirically determined.

[0368] 2. Topical Administration

[0369] Topical mixtures are prepared as described for the local and systemic administration. The resulting mixture may be a solution, suspension, emulsions or the like and are formulated as creams, gels, ointments, emulsions, solutions, elixirs, lotions, suspensions, tinctures, pastes, foams, aerosols, irrigations, sprays, suppositories, bandages, dermal patches or any other formulations suitable for topical administration.

[0370] The compounds or pharmaceutically acceptable derivatives thereof may be formulated as aerosols for topical application, such as by inhalation (see, e.g., U.S. Pat. Nos. 4,044,126; 4,414,209; and 4,364,923, which describe aerosols for delivery of a steroid useful for treatment inflammatory diseases, particularly asthma). These formulations for administration to the respiratory tract can be in the form of an aerosol or solution for a nebulizer, or as a microfine powder for insufflation, alone or in combination with an inert carrier such as lactose. In such a case, the particles of the formulation will typically diameters of less than 50 microns, preferably less than 10 microns.

[0371] The compounds may be formulated for local or topical application, such as for topical application to the skin and mucous membranes, such as in the eye, in the form of gels, creams, and lotions and for application to the eye or for intracisternal or intraspinal application. Topical administration is contemplated for transdermal delivery and also for administration to the eyes or mucosa, or for inhalation therapies. Nasal solutions of the active compound alone or in combination with other pharmaceutically acceptable excipients also can be administered.

[0372] Formulations suitable for transdermal administration are provided. They can be provided in any suitable format, such as discrete patches adapted to remain in intimate contact with the epidermis of the recipient for a prolonged period of time. Such patches contain the active compound in optionally buffered aqueous solution of, for example, 0.1 to 0.2M concentration with respect to the active compound. Formulations suitable for transdermal administration also can be delivered by iontophoresis (see, e.g., Pharmaceutical Research 3(6), 318 (1986)) and typically take the form of an optionally buffered aqueous solution of the active compound.

[0373] 3. Compositions for Other Routes of Administration

[0374] Depending upon the condition treated other routes of administration, such as topical application, transdermal patches, oral and rectal administration are also contemplated herein. For example, pharmaceutical dosage forms for rectal administration are rectal suppositories, capsules and tablets for systemic effect. Rectal suppositories include solid bodies for insertion into the rectum which melt or soften at body temperature releasing one or more pharmacologically or therapeutically active ingredients. Pharmaceutically acceptable substances utilized in rectal suppositories are bases or vehicles and agents to raise the melting point. Examples of bases include cocoa butter (theobroma oil), glycerin-gelatin, carbowax (polyoxyethylene glycol) and appropriate mixtures of mono-, di- and triglycerides of fatty acids. Combinations of the various bases may be used. Agents to raise the melting point of suppositories include spermaceti and wax. Rectal suppositories may be prepared either by the compressed method or by molding. The typical weight of a rectal suppository is about 2 to 3 gm. Tablets and capsules for rectal administration are manufactured using the same pharmaceutically acceptable substance and by the same methods as for formulations for oral administration.

[0375] Formulations suitable for rectal administration can be provided as unit dose suppositories. These can be prepared by admixing the active compound with one or more conventional solid carriers, for example, cocoa butter, and then shaping the resulting mixture.

[0376] For oral administration, pharmaceutical compositions can take the form of, for example, tablets or capsules prepared by conventional means with pharmaceutically acceptable excipients such as binding agents (e.g., pregelatinized maize starch, polyvinyl pyrrolidone or hydroxypropyl methylcellulose); fillers (e.g., lactose, microcrystalline cellulose or calcium hydrogen phosphate); lubricants (e.g., magnesium stearate, talc or silica); disintegrants (e.g., potato starch or sodium starch glycolate); or wetting agents (e.g., sodium lauryl sulphate). The tablets can be coated by methods well-known in the art.

[0377] Formulations suitable for buccal (sublingual) administration include, for example, lozenges containing the active compound in a flavored base, usually sucrose and acacia or tragacanth; and pastilles containing the compound in an inert base such as gelatin and glycerin or sucrose and acacia.

[0378] Pharmaceutical compositions also can be administered by controlled release formulations and/or delivery devices (see, e.g., in U.S. Pat. Nos. 3,536,809; 3,598,123; 3,630,200; 3,845,770; 3,847,770; 3,916,899; 4,008,719; 4,687,610; 4,769,027; 5,059,595; 5,073,543; 5,120,548; 5,354,566; 5,591,767; 5,639,476; 5,674,533 and 5,733,566).

[0379] Various delivery systems are known and can be used to administer selected matrix-degrading enzymes, such as but not limited to, encapsulation in liposomes, microparticles, microcapsules, recombinant cells capable of expressing the compound, receptor mediated endocytosis, and delivery of nucleic acid molecules encoding selected matrix-degrading enzymes such as retrovirus delivery systems.

[0380] Hence, in certain embodiments, liposomes and/or nanoparticles also can be employed with administration of matrix-degrading enzymes. Liposomes are formed from phospholipids that are dispersed in an aqueous medium and spontaneously form multilamellar concentric bilayer vesicles (also termed multilamellar vesicles (MLVs)). MLVs generally have diameters of from 25 nm to 4 μm. Typically, liposomes are also prepared containing cholesterol to stabilize the nanoparticles. Sonication of MLVs results in the formation of small unilamellar vesicles (SUVs) with diameters in the range of 200 to 500 angstroms containing an aqueous solution in the core.

[0381] Phospholipids can form a variety of structures other than liposomes when dispersed in water, depending on the molar ratio of lipid to water. At low ratios, the liposomes form. Physical characteristics of liposomes depend on pH, ionic strength and the presence of divalent cations. Liposomes can show low permeability to ionic and polar substances, but at elevated temperatures undergo a phase transition which markedly alters their permeability. The phase transition involves a change from a closely packed, ordered structure, known as the gel state, to a loosely packed, less-ordered structure, known as the fluid state. This occurs at a characteristic phase-transition temperature and results in an increase in permeability to ions, sugars and drugs.

[0382] Liposomes interact with cells via different mechanisms: endocytosis by phagocytic cells of the reticuloendothelial system such as macrophages and neutrophils; adsorption to the cell surface, either by nonspecific weak hydrophobic or electrostatic forces, or by specific interactions with cell-surface components; fusion with the plasma cell membrane by insertion of the lipid bilayer of the liposome into the plasma membrane, with simultaneous release of liposomal contents into the cytoplasm; and by transfer of liposomal lipids to cellular or subcellular membranes, or vice versa, without any association of the liposome contents. Varying the liposome formulation can alter which mechanism is operative, although more than one can operate at the same time. Nanocapsules can generally entrap compounds in a stable and reproducible way. To avoid side effects due to intracellular polymeric overloading, such ultrafine particles (sized around 0.1 μm) should be designed using polymers able to be degraded in vivo. Biodegradable polyalkyl-cyanoacrylate nanoparticles that meet these requirements are contemplated for use herein, and such particles can be easily made.

[0383] 4. Combination Therapies

[0384] Any of the activatable matrix-degrading enzymes and activator combinations described herein can be further co-formulated or co-administered together with, prior to, intermittently with, or subsequent to, other therapeutic or pharmacologic agents or procedures. Such agents include, but are not limited to, other biologics, small molecule compounds, dispersing agents, anesthetics, vasoconstrictors and surgery, and combinations thereof. For example, for any disease or condition, including all those exemplified above, for which other agents and treatments are available, selected activatable matrix-degrading enzyme and activator combination for such diseases and conditions can be used in combination therewith. In another example, a local anesthetic, for example, lidocaine can be administered to provide pain relief. In some examples, the anesthetic can be provided in combination with a vasoconstrictor to increase the duration of the anesthetic effects. Any of the pharmacological agents provided herein can be combined with a dispersion agent that facilitates access into the tissue of pharmacologic agents, for example, following subcutaneous administration. Such substances are known in the art and include, for example, soluble glycosaminoglycanase enzymes such as hyaluronan degrading enzymes, for example, members of the hyaluronidase glycoprotein family (see, e.g., U.S. Publication Nos. 20050260186 and 20060104968).

[0385] Compositions of activatable matrix-degrading enzymes provided herein can be co-formulated or co-administered with a local anesthesia. For example, where pH is provided as the activating condition, administration of a local anesthesia is desired to minimize pain associated with exposure to acidic pH. Anesthsias include short-acting and long-lasting local anesthetic drug formulations. Short-acting local anesthetic drug formulations contain lidocaine or a related local anesthetic drug dissolved in saline or other suitable injection vehicle. Typically, local anesthesia with short-acting local anesthetics last approximately 20-30 minutes. Exemplary anesthetics include, for example, non-inhalation local anesthetics such as ambucaines; amoxecaines; amylocalnes; aptocaines; articaines; benoxinates; benzyl alcohols; benzocaines; betoxycaines; biphenamines; bucricaines; bumecaines; bupivacaines; butacaines; butambens; butanilicaines; carbizocaines; chloroprocaine; clibucaines; clodacaines; cocaines; dexivacaines; diamocaines; dibucaines; dyclonines; elucaines; etidocaines; euprocins; fexicaines; fomocaines; heptacaines; hexylcaines; hydroxyprocaines; hydroxytetracaines; isobutambens; ketocaines; leucinocaines; lidocaines; mepivacaines; meprylcaines; octocaines; orthocaines; oxethacaines; oxybuprocaines; phenacaines; pinolcaines; piperocaines; piridocaines; polidocanols; pramocaines; prilocalnes; procaines; propanocaines; propipocaines; propoxycaines; proxymetacaines; pyrrocaines; quatacaines; quinisocaines; risocaines; rodocaines; ropivacaines; salicyl alcohols; suicaines; tetracaines; trapencaines; and trimecaines; as well as various other non-inhalation anesthetics such as alfaxalones; amolanones; etoxadrols; fentanyls; ketamines; levoxadrols; methiturals; methohexitals; midazolams; minaxolones; propanidids; propoxates; pramoxines; propofols; remifentanyls; sufentanyls; tiletamines; and zolamine. The effective amount in the formulation will vary depending on the particular patient, disease to be treated, route of administration and other considerations. Such dosages can be determined empirically.

[0386] Due to the short half-life of local anesthetics, it is often desirable to co-administer or co-formulate such anesthetics with a vasoconstrictor. Examples of vasoconstrictors include alpha adrenergic receptor agonists including catecholamines and catecholamine derivatives. Particular examples include, but are not limited to, levonordefrin, epinephrine and norepinephrine. For example, a local anesthetic formulation, such as lidocaine, can be formulated to contain low concentrations of epinephrine or another adrenergic receptor agonist such as levonordefrin. Combining local anesthetics with adrenergic receptor agonists is common in pharmaceutical preparations (see e.g., U.S. Pat. Nos. 7,261,889 and 5,976,556). The vasoconstrictor is necessary to increase the half-life of anesthetics. The vasoconstrictor, such as epinephrine, stimulates alpha-adrenergic receptors on the blood vessels in the injected tissue. This has the effect of constriction the blood vessels in the tissue. The blood vessel constriction causes the local anesthetic to stay in the tissue much longer, resulting in a large increase in the duration of the anesthetic effect.

[0387] Generally, a vasoconstrictor is used herein in combination with an anesthetic. The anesthetic agent and vasoconstrictor can be administered together as part of a single pharmaceutical composition or as part of separate pharmaceutical compositions so long as the vasoconstrictor acts to constrict the blood vessels in the vicinity of whether the anesthetic agent has been administered to result in a prolonging of anesthesia. In one example, the anesthetic agent and vasoconstrictor are administered together in solution. In addition, the anesthetic agent and vasoconstrictor can be formulated together or separate from the activatable matrix-degrading enzyme and activator. Single formulations are preferred. The anesthetic agent and vasoconstrictor can be administered by injection, by infiltration or by topical administration, e.g., as part of a gel or paste. Typically, the anesthetic agent and vasoconstrictor are administered by injection directly into the site to be anesthetized, for example, by subcutaneous administration. The effective amount in the formulation will vary depending on the particular patient, disease to be treated, route of administration and other considerations. Such dosages can be determined empirically. For example, exemplary amounts of lidocaine is or is about 10 mg to 1000 mg, 100 mg to 500 mg, 200 mg to 400 mg, 20 mg to 60 mg, or 30 mg to 50 mg. The dosage of lidocaine administered will vary depending on the individual and the route of administration. Epinephrine can be administered in amounts such as, for example, 10 μg to 5 mg, 50 μg to 1 mg, 50 μg to 500 μg, 50 μg to 250 μg, 100 μg to 500 μg, 200 μg to 400 μg, 1 mg to 5 mg or 2 mg to 4 mg. Typically, epinephrine can be combined with lidocaine in a 1:100,000 to 1:200,000 dilution, which means that 100 ml of anesthetic contains 0.5 to 1 mg of epinephrine. Volumes administered can be adjusted depending on the disease to be treated and the route of administration. It is contemplated herein that 1-1100 ml, 1-50 ml, 10-50 ml, 10-30 ml, 1-20 ml, or 1-10 ml, typically 10-50 ml of an anesthetic/vasoconstrictor formulation can be administered subcutaneously for the treatment of an ECM-mediated disease or condition, such as cellulite. The administration can be subsequently, simultaneously or intermittently with administration of an activatable matrix-degrading enzyme and activator.

[0388] Compositions of activatable matrix-degrading enzymes provided herein also can be co-formulated or co-administered with a dispersion agent. The dispersion agent also can be co-formulated or co-administered with other pharmacological agents, such as anesthetics, vasoconstrictors, or other biologic agents. Exemplary of dispersion agents are glycosaminoglycanases, such as hyaluronan degrading enzymes, for example, hyaluronidases, that open channels in the interstitial space through degradation of glycosaminoglycans. These channels can remain relatively open for a period of 24-48 hours depending on dose and formulation. Such channels can be used to facilitate the diffusion of exogenously added molecules such as fluids, small molecules, proteins (such as matrix degrading enzymes), nucleic acids and gene therapy vectors and other molecules less than about 500 nm in size. In addition, it is thought that the formation of such channels can facilitate bulk fluid flow within an interstitial space, which can in turn promote the dispersion or movement of a solute (such as a detectable molecule or other diagnostic agent, an anesthetic or other tissue-modifying agent, a pharmacologic or pharmaceutically effective agent, or a cosmetic or other esthetic agent) that is effectively carried by the fluid in a process sometimes referred to as “convective transport” or simply convection. Such convective transport can substantially exceed the rate and cumulative effects of molecular diffusion and can thus cause the therapeutic or other administered molecule to more rapidly and effectively perfuse a tissue. Furthermore, when an agent, such as a matrix degrading enzyme, anesthetic or other agent, is co-formulated or co-administered with a glycosaminoglycanase and both are injected into a relatively confined local site, such as a site of non-intravenous parenteral administration (e.g., intradermal, subcutaneous, intramuscular, or into or around other internal tissues, organs or other relatively confined spaces within the body), then the fluid associated with the administered dose can both provide a local driving force (i.e. hydrostatic pressure) as well as lower impedance to flow (by opening channels within the interstitial matrix), both of which could increase fluid flow, and with it convective transport of the therapeutic agent or other molecule contained within the fluid. As a result, the use of glycosaminoglycanases can have substantial utility for improving the bioavailability as well as manipulating other pharmacokinetic and/or pharmacodynamic characteristics of co-formulated or co-administered agents, such as matrix degrading enzymes.

[0389] a. Hyaluronan Degrading Enzymes

[0390] Exemplary of glycosaminoglycanases are hyaluronan-degrading enzymes. Hyaluronan degrading enzymes include any enzyme that degrades hyaluronan. Exemplary hyaluronan degrading enzymes include, but are not limited to hyaluronidases and particular chondroitinases and lyases that have the ability to cleave hyaluronan. Exemplary of hyaluronan degrading enzymes in the compositions, combinations and methods provided herein are soluble hyaluronan degrading enzymes. For example, exemplary of glycosaminoglycanases are hyaluronidases. Hyaluronan-degrading enzymes, such as hyaluronidases, are a family of enzymes that degrade hyaluronic acid. By catalyzing the hydrolysis of hyaluronic acid, a major constituent of the interstitial barrier, hyaluronidase lowers the viscosity of hyaluronic acid, thereby increasing tissue permeability.

[0391] Hyaluronan, also called hyaluronic acid or hyaluronate, is a non-sulfated glycosaminoglycan that is widely distributed throughout connective, epithelial, and neural tissues. Hyaluronan is an essential component of the extracellular matrix and a major constituent of the interstitial barrier. By catalyzing the hydrolysis of hyaluronan, hyaluronan degrading enzymes lower the viscosity of hyaluronan, thereby increasing tissue permeability and increasing the absorption rate of fluids administered parenterally. As such, hyaluronan degrading enzymes, such as hyaluronidases, have been used, for example, as spreading or dispersing agents in conjunction with other agents, drugs and proteins to enhance their dispersion and delivery.

[0392] Hyaluronan degrading enzymes act to degrade hyaluronan by cleaving hyaluronan polymers, which are composed of repeating disaccharides units, D-glucuronic acid (GlcA) and N-acetyl-D-glucosamine (GlcNAc), linked together via alternating β-1→4 and β-1→3 glycosidic bonds. Hyaluronan chains can reach about 25,000 disaccharide repeats or more in length and polymers of hyaluronan can range in size from about 5,000 to 20,000,000 Da in vivo. Accordingly, hyaluronan degrading enzymes for the uses and methods provided include any enzyme having the ability to catalyze the cleavage of a hyaluronan disaccharide chain or polymer. In some examples the hyaluronan degrading enzyme cleaves the β-1→4 glycosidic bond in the hyaluronan chain or polymer. In other examples, the hyaluronan degrading enzyme catalyze the cleavage of the 1-1→3 glycosidic bond in the hyaluronan chain or polymer.

[0393] i. Hyaluronidases

[0394] There are three general classes of hyaluronidases: Mammalian-type hyaluronidases, (EC 3.2.1.35) which are endo-beta-N-acetylhexosaminidases with tetrasaccharides and hexasaccharides as the major end products; Bacterial hyaluronidases (EC 4.2.99.1), degrade hyaluronan and, and to various extents, chondroitin sulfates (CS) and dermatan sulfates (DS), which are endo-beta-N-acetylhexosaminidases that operate by a beta elimination reaction that yields primarily disaccharide end products; and Hyaluronidases (EC 3.2.1.36) from leeches, other parasites, and crustaceans that are endo-beta-glucuronidases that generate tetrasaccharide and hexasaccharide end products through hydrolysis of the β1-3 linkage.

[0395] 1) Mammalian-Type Hyaluronidases

[0396] Mammalian-type hyaluronidases have both hydrolytic and transglycosidase activities, and can degrade hyaluronan and chondroitin sulfates (CS), generally C4-S and C6-S. Hyaluronidases of this type include, but are not limited to, hyaluronidases from cows (bovine) (SEQ ID NOS:237, 266 and 272 and BH55 (U.S. Pat. Nos. 5,747,027 and 5,827,721), sheep (ovis aries) (SEQ ID NO:252, 267, 271 and 272), yellow jacket wasp (SEQ ID NOS:238 and 239), honey bee (SEQ ID NO:240), white-face hornet (SEQ ID NO:241), paper wasp (SEQ ID NO:242), mouse (SEQ ID NOS:243-245, 257), pig (SEQ ID NOS:246, 247), rat (SEQ ID NOS:248-250, 256), rabbit (SEQ ID NO:251), orangutan (SEQ ID NO:253), cynomolgus monkey (SEQ ID NO:254), guinea pig (SEQ ID NO:255), and human hyaluronidases. Exemplary of hyaluronidases in the compositions, combinations and methods provided herein are soluble hyaluronidases.

[0397] There are six hyaluronidase-like genes in the human genome, HYAL1 (SEQ ID NO:262), HYAL2 (SEQ ID NO: 263), HYAL3 (SEQ ID NO:264), HYAL4 (SEQ ID NO:265) and PH20/SPAM1 (SEQ ID NO:232). Among hyaluronidases, PH20 is the prototypical neutral active enzyme, while the others exhibit no catalytic activity towards hyaluronan or any known substrates, or are active only under pH conditions. The hyaluronidase-like enzymes can also be characterized by those which are generally locked to the plasma membrane via a glycosylphosphatidyl inositol anchor such as human HYAL2 and human PH20 (Danilkovitch-Miagkova, et al. (2003) Proc Natl Acad Sci USA. 100(8):4580-5), and those which are generally soluble such as human HYAL1 (Frost et al, (1997) Biochem Biophys Res Commun. 236(1):10-5). N-linked glycosylation of some hyaluronidases can be very important for their catalytic activity and stability. While altering the type of glycan modifying a glycoprotein can have dramatic affects on a protein's antigenicity, structural folding, solubility, and stability, many enzymes are not thought to require glycosylation for optimal enzyme activity. Hyaluronidases are, therefore, unique in this regard, in that removal of N-linked glycosylation can result in near complete inactivation of the hyaluronidase activity. For such hyaluronidases, the presence of N-linked glycans is critical for generating an active enzyme.

[0398] Hence, mammalian hyaluronidases can be further subdivided into those that are neutral active, predominantly found in testes extracts, and acid active, predominantly found in organs such as the liver. Exemplary neutral active hyaluronidases include PH20, including but not limited to, PH20 derived from different species such as ovine (SEQ ID NO:267), bovine (SEQ ID NO:266) and human (SEQ ID NO:232).

[0399] Human PH20 (also known as sperm surface protein PH20) is naturally involved in sperm-egg adhesion and aids penetration by sperm of the layer of cumulus cells by digesting hyaluronic acid. The PH20 mRNA transcript (corresponding to nucleotides 1058-2503 of the sequence set forth in SEQ ID NO:224) is normally translated to generate a 509 amino acid precursor protein containing a 35 amino acid signal sequence at the N-terminus (amino acid residue positions 1-35) and a 19 amino acid GPI anchor at the C-terminus (corresponding to amino acid residues 491-509). The precursor sequence is set forth in SEQ ID NO:232. An mRNA transcript containing a mutation of C to T at nucleotide position 2188 of the sequence of amino acids set forth in SEQ ID NO:224 also exists and is a silent mutation resulting in the translated product set forth in SEQ ID NO: 232. The mature PH20 is, therefore, a 474 amino acid polypeptide set forth in SEQ ID NO:233). There are potential N-linked glycosylation sites required for hyaluronidases activity at N82, N166, N235, N254, N368, N393, N490 of human PH20 exemplified in SEQ ID NO: 232. Disulfide bonds form between the cysteine residues C60 and C351 and between C224 and C238 (corresponding to amino acids set forth in SEQ ID NO:232) to form the core hyaluronidase domain. However, additional cysteines are required in the carboxy terminus for neutral enzyme catalytic activity such that amino acids 36 to 464 of SEQ ID NO:232 contains the minimally active human PH20 hyaluronidase domain.

[0400] Bovine PH20 is a 553 amino acid precursor polypeptide (SEQ ID NO:266). Alignment of bovine PH20 with the human PH20 shows only weak homology, with multiple gaps existing from amino acid 470 through to the respective carboxy termini due to the absence of a GPI anchor in the bovine polypeptide (see e.g., Frost GI (2007) Expert Opin. Drug. Deliv. 4: 427-440). No clear GPI anchor is predicted in other PH20 species besides humans. For example, PH20 polypeptides produced from ovine and bovine exist as soluble forms. Though bovine PH20 exists very loosely attached to the plasma membrane, it is not anchored via a phospholipase sensitive anchor (Lalancette et al. (2001) Biol Reprod. 65(2):628-36). This unique feature of bovine hyaluronidase has permitted the use of the soluble bovine testes hyaluronidase enzyme as an extract for clinical use (Wydase™, Hyalase™).

[0401] 2) Bacterial Hyaluronidases

[0402] Bacterial hyaluronidases (EC 4.2.2.1 or EC 4.2.99.1) degrade hyaluronan and, to various extents, chondroitin sulfates and dermatan sulfates. Hyaluronan lyases isolated from bacteria differ from hyaluronidases (from other sources, e.g., hyaluronoglucosaminidases, EC 3.2.1.35) by their mode of action. They are endo-β-N-acetylhexosaminidases that catalyze an elimination reaction, rather than hydrolysis, of the β1→4-glycosidic linkage between N-acetyl-beta-D-glucosamine and D-glucuronic acid residues in hyaluronan, yielding 3-(4-deoxy-β-D-gluc-4-enuronosyl)-N-acetyl-D-glucosamine tetra- and hexasaccharides, and disaccharide end products. The reaction results in the formation of oligosaccharides with unsaturated hexuronic acid residues at their nonreducing ends.

[0403] Exemplary hyaluronidases from bacteria for use in the compositions, combinations and methods provided include, but are not limited to, hyaluronan degrading enzymes in microorganisms, including strains of Arthrobacter, Bdellovibrio, Clostridium, Micrococcus, Streptococcus, Peptococcus, Propionibacterium, Bacteroides, and Streptomyces. Particular examples of such enzymes include, but are not limited to Arthrobacter sp. (strain FB24) (SEQ ID NO:275), Bdellovibrio bacteriovorus (SEQ ID NO:276), Propionibacterium acnes (SEQ ID NO:277), Streptococcus agalactiae ((SEQ ID NO:278); 18RS21 (SEQ ID NO:279); serotype Ia (SEQ ID NO:280); serotype III (SEQ ID NO:281), Staphylococcus aureus (strain COL (SEQ ID NO:282); strain MRSA252 (SEQ ID NOS:283 and 284); strain MSSA476 (SEQ ID NO:285); strain NCTC 8325 (SEQ ID NO:286); strain bovine RF122 (SEQ ID NOS:287 and 288); strain USA300 (SEQ ID NO:289), Streptococcus pneumoniae ((SEQ ID NO:290); strain ATCC BAA-255/R6 (SEQ ID NO:291); serotype 2, strain D39/NCTC 7466 (SEQ ID NO:292), Streptococcus pyogenes (serotype M1) (SEQ ID NO:293); serotype M2, strain MGAS10270 (SEQ ID NO:294); serotype M4, strain MGAS10750 (SEQ ID NO:295); serotype M6 (SEQ ID NO:296); serotype M12, strain MGAS2096 (SEQ ID NOS:297 and 298); serotype M12, strain MGAS9429 (SEQ ID NO:299); serotype M28 (SEQ ID NO:300); Streptococcus suis (SEQ ID NOS:301-303); Vibrio fischeri (strain ATCC 700601/ES114 (SEQ ID NO:304)), and the Streptomyces hyaluronolyticus hyaluronidase enzyme, which is specific for hyaluronic acid and does not cleave chondroitin or chondroitin sulfate (Ohya, T. and Kaneko, Y. (1970) Biochim. Biophys. Acta 198:607).

[0404] 3) Hyaluronidases from Leeches, Other Parasites and Crustaceans

[0405] Hyaluronidases from leeches, other parasites, and crustaceans (EC 3.2.1.36) are endo-β-glucuronidases that generate tetra- and hexasaccharide end-products. These enzymes catalyze hydrolysis of β1→3-linkages between β-D-glucuronate and N-acetyl-D-glucosamine residues in hyaluronate. Exemplary hyaluronidases from leeches include, but are not limited to, hyaluronidase from Hirudinidae (e.g., Hirudo medicinalis), Erpobdellidae (e.g., Nephelopsis obscura and Erpobdella punctata,), Glossiphoniidae (e.g., Desserobdella picta, Helobdella stagnalis, Glossiphonia complanata, Placobdella ornata and Theromyzon sp.) and Haemopidae (Haemopis marmorata) (Hovingh et al. (1999) Comp Biochem Physiol B Biochem Mol Biol. 124(3):319-26). An exemplary hyaluronidase from bacteria that has the same mechanism of action as the leech hyaluronidase is that from the cyanobacteria, Synechococcus sp. (strain RCC307, SEQ ID NO:305).

[0406] iI. Other Hyaluronan Degrading Enzymes

[0407] In addition to the hyaluronidase family, other hyaluronan degrading enzymes can be used in conjunction with the activatable matrix degrading enzymes in the compositions, combinations and methods provided. For example, enzymes, including particular chondroitinases and lyases, that have the ability to cleave hyaluronan can be employed. Exemplary chondroitinases that can degrade hyaluronan include, but are not limited to, chondroitin ABC lyase (also known as chondroitinase ABC), chondroitin AC lyase (also known as chondroitin sulfate lyase or chondroitin sulfate eliminase) and chondroitin C lyase. Methods for production and purification of such enzymes for use in the compositions, combinations, and methods provided are known in the art (e.g., U.S. Pat. No. 6,054,569; Yamagata, et al. (1968) J. Biol. Chem. 243(7):1523-1535; Yang et al. (1985) J. Biol. Chem. 160(30):1849-1857).

[0408] Chondroitin ABC lyase contains two enzymes, chondroitin-sulfate-ABC endolyase (EC 4.2.2.20) and chondroitin-sulfate-ABC exolyase (EC 4.2.2.21) (Hamai et al. (1997) J Biol Chem. 272(14):9123-30), which degrade a variety of glycosaminoglycans of the chondroitin-sulfate- and dermatan-sulfate type. Chondroitin sulfate, chondroitin-sulfate proteoglycan and dermatan sulfate are the preferred substrates for chondroitin-sulfate-ABC endolyase, but the enzyme also can act on hyaluronan at a lower rate. Chondroitin-sulfate-ABC endolyase degrades a variety of glycosaminoglycans of the chondroitin-sulfate- and dermatan-sulfate type, producing a mixture of Δ4-unsaturated oligosaccharides of different sizes that are ultimately degraded to Δ4-unsaturated tetra- and disaccharides. Chondroitin-sulfate-ABC exolyase has the same substrate specificity but removes disaccharide residues from the non-reducing ends of both polymeric chondroitin sulfates and their oligosaccharide fragments produced by chondroitin-sulfate-ABC endolyase (Hamai, A. et al. (1997) J. Biol. Chem. 272:9123-9130). A exemplary chondroitin-sulfate-ABC endolyases and chondroitin-sulfate-ABC exolyases include, but are not limited to, those from Proteus vulgaris and Flavobacterium heparinum (the Proteus vulgaris chondroitin-sulfate-ABC endolyase is set forth in SEQ ID NO: 306 (Sato et al. (1994) Appl. Microbiol. Biotechnol. 41(1):39-46).

[0409] Chondroitin AC lyase (EC 4.2.2.5) is active on chondroitin sulfates A and C, chondroitin and hyaluronic acid, but is not active on dermatan sulfate (chondroitin sulfate B). Exemplary chondroitinase AC enzymes from the bacteria include, but are not limited to, those from Flavobacterium heparinum and Victivallis vadensis, set forth in SEQ ID NOS:307 and 308, respectively, and Arthrobacter aurescens (Tkalec et al. (2000) Applied and Environmental Microbiology 66(1):29-35; Ernst et al. (1995) Critical Reviews in Biochemistry and Molecular Biology 30(5):387-444).

[0410] Chondroitinase C cleaves chondroitin sulfate C producing tetrasaccharide plus an unsaturated 6-sulfated disaccharide (delta Di-6S). It also cleaves hyaluronic acid producing unsaturated non-sulfated disaccharide (delta Di-OS). Exemplary chondroitinase C enzymes from the bacteria include, but are not limited to, those from Streptococcus and Flavobacterium (Hibi et al. (1989) FEMS-Microbiol-Lett. 48(2):121-4; Michelacci et al. (1976) J. Biol. Chem. 251:1154-8; Tsuda et al. (1999) Eur. J. Biochem. 262:127-133).

[0411] iii. Soluble Hyaluronan Degrading Enzymes

[0412] Soluble hyaluronan degrading enzymes, including soluble hyaluronidases can be used in the methods, combinations or compositions provided herein for co-administration or co-formulation with matrix degrading enzymes, activators, anesthetics, vasoconstrictors, other pharmacologic or therapeutic agents, or combinations thereof, to permit the diffusion into tissues. Soluble hyaluronan degrading enzymes include any hyaluronan degrading enzymes that exist in soluble form, including, but not limited to, hyaluronidases such as bovine PH20 and ovine PH20, allelic variants thereof and other variants. Also included among soluble hyaluronan degrading enzymes are any hyaluronan degrading enzymes that have been modified to be soluble. For example, hyaluronan degrading enzymes that contain a GPI anchor can be made soluble by truncation of and removal of all or a portion of the GPI anchor. In one example, the human hyaluronidase PH20, which is normally membrane anchored via a GPI anchor, can be made soluble by truncation of and removal of all or a portion of the GPI anchor at the C-terminus.

[0413] Soluble hyaluronan degrading enzymes also include neutral active and acid active hyaluronidases. Depending on factors, such as, but not limited to, the desired level of activity of the enzyme following administration and/or site of administration, neutral active and acid active hyaluronidases can be selected. In a particular example, the hyaluronan degrading enzyme for use in the compositions, combinations and methods is a soluble neutral active hyaluronidase.

[0414] Exemplary of a soluble hyaluronidase is PH20 from any species, such as any set forth in any of SEQ ID NOS:232, 233, 266, 251, 267, 255, 257, 271-274, or truncated forms thereof lacking all or a portion of the C-terminal GPI anchor, so long as the hyaluronidase is soluble and retains hyaluronidase activity. Also included among soluble hyaluronidases are allelic variants or other variants of any of SEQ ID NOS:232, 233, 266, 251, 267, 255, 257, 271-274, or truncated forms thereof. Allelic variants and other variants are known to one of skill in the art, and include polypeptides having 60%, 70%, 80%, 90%, 91%, 92%, 93%, 94%, 95% or more sequence identity to any of SEQ ID NOS:232, 233, 266, 251, 267, 255, 257, 271-274, or truncated forms thereof.

[0415] Typically, for use in the compositions, combinations, and methods herein, a soluble human PH20 is used. Although PH20 from other animals can be utilized, such preparations are potentially immunogenic, since they are animal proteins. For example, a significant proportion of patients demonstrate prior sensitization secondary to ingested foods, and since these are animal proteins, all patients have a risk of subsequent sensitization. Thus, non-human preparations may not be suitable for chronic use. If non-human preparations are desired, it is contemplated herein that such polypeptides can be prepared to have reduced immunogenicity. Such modifications are within the level of one of skill in the art and can include, for example, removal and/or replacement of one or more antigenic epitopes on the molecule.

[0416] Hyaluronan degrading enzymes, including hyaluronidases (e.g., PH20), used in the methods herein can be recombinantly produced or can be purified or partially-purified from natural sources, such as, for example, from testes extracts. Methods for production of recombinant proteins, including recombinant hyaluronan degrading enzymes, are provided elsewhere herein and are well known in the art.

[0417] 1) Soluble Human PH20

[0418] For example, soluble forms of recombinant human PH20 have been produced and can be used in the methods described herein for co-administration or co-formulation with matrix degrading enzymes, activators, anesthetics, vasoconstrictors, other pharmacologic or therapeutic agents, or combinations thereof, to permit the diffusion into tissues. The production of such soluble forms of PH20 is described in related application Ser. Nos. 11/065,716 and 11/238,171, and in Examples 12-15 below. Soluble forms include, but are not limited to, any having C-terminal truncations to generate polypeptides containing amino acid 1 to amino acid 347, 372, 394, 413, 430, 447, 467, 477, 478, 479, 480, 481, 482 and 483 of the sequence of amino acids set forth in SEQ ID NO:232. When expressed in mammalian cells, the 35 amino acid N-terminal signal sequence is cleaved during processing, and the mature form of the protein is secreted. Thus, the mature soluble polypeptides contain amino acids 36 to 347, 372, 394, 413, 430, 447, 467, 477, 478, 479, 480, 481, 482 and 483 of SEQ ID NO:232. Deletion mutants ending at amino acid position 477 to 483 (corresponding to the precursor polypeptide set forth in SEQ ID NO:232) exhibit higher secreted hyaluronidase activity than the full length GPI-anchored form. Hence, soluble forms include, but are not limited to, any having C-terminal truncations to generate polypeptides containing amino acid 1 to amino acid 442, 443, 444, 445, 446 and 447 of the sequence of amino acids set forth in any of SEQ ID NOS 226-231, respectively, or allelic or species variants or other variants thereof. Generally soluble forms of PH20 are produced using protein expression systems that facilitate correct N-glycosylation to ensure the polypeptide retains activity, since glycosylation is important for the catalytic activity and stability of hyaluronidases. Such cells include, for example Chinese Hamster Ovary (CHO) cells (e.g. DG44 CHO cells).

[0419] 2) rHuPH20

[0420] Recombinant soluble forms of human PH20 have been generated and can be produced and purified using the methods described herein. The generation of such soluble forms of recombinant human PH20 are described in related application Ser. Nos. 11/065,716 and 11/238,171, and in Examples 12-15 below. Exemplary of such a polypeptide are those generated from a nucleic acid molecule encoding amino acids 1-482 set forth in SEQ ID NO:225. The generation, production and purification of this PH20 is described in Examples 12-15 below. Resulting purified rHuPH20 can be heterogeneous due to peptidases present in the culture medium upon production and purification. As produced in the culture medium there is heterogeneity at the C-terminus so that the product, called rHuPH20, includes a mixture of species that can include any one or more of SEQ ID NOS. 226-231 in various abundance. Generally soluble forms of PH20, such as rHuPH20, are produced using protein expression systems that facilitate correct N-glycosylation to ensure the polypeptide retains activity, since glycosylation is important for the catalytic activity and stability of hyaluronidases. Such cells include, for example Chinese Hamster Ovary (CHO) cells (e.g. DG44 CHO cells).

[0421] Hyaluronan degrading enzymes, such as any hyaluronidase, in particular a soluble PH20 such as rHuPH20, can be administered by any suitable route as described elsewhere herein. Typically, administration is by parenteral administration, such as by intradermal, intramuscular, subcutaneous or intravascular administration. The compounds provided herein can be formulated for parenteral administration by injection, e.g., by bolus injection or continuous infusion. Formulations for injection can be presented in unit dosage form, e.g., in ampoules or in multi-dose containers, with an added preservative. The compositions can be suspensions, solutions or emulsions in oily or aqueous vehicles, and can contain formulatory agents such as suspending, stabilizing and/or dispersing agents. Alternatively, the active ingredient can be in powder form for reconstitution with a suitable vehicle, e.g., sterile pyrogen-free water or other solvents, before use. For example, provided herein are parenteral formulations containing an effective amount of soluble PH20, such as 10 Units to 500,000 Units, 100 Units to 100,000 Units, 500 Units to 50,000 Units, 1000 Units to 10,000 Units, 5000 Units to 7500 Units, 5000 Units to 50,000 Units, or 1,000 Units to 10,000 Units, generally 10,000 to 50,000 Units, in a stabilized solution or suspension or a lyophilized from. The formulations can be provided in unit-dose forms such as, but not limited to, ampoules, syringes and individually packaged tablets or capsules. The dispersing agent can be administered alone, or with other pharmacologically effective agents in a total volume of 1-100 ml, 1-50 ml, 10-50 ml, 10-30 ml, 1-20 ml, or 1-10 ml, typically 10-50 ml.

[0422] In one example of a combination therapy, it is contemplated herein that a anesthetic, vasoconstrictor and dispersion agent are co-administered or co-formulated with an activatable matrix-degrading enzyme and/or activator to be administered subsequently, simultaneously or intermittently therewith. An exemplary formulation is one containing lidocaine, epinephrine and a soluble PH20, for example, a soluble

[0423] PH20 set forth in SEQ ID NO:226. Soluble PH20 can be mixed directly with lidocaine (Xylocalne), and optionally with epinephrine. The formulation can be prepared in a unit dosage form, such as in a syringe. For example, the lidocaine/epinephrine/soluble PH20 formulation can be provided in a volume, such as 1-100 ml, 1-50 ml, 10-50 ml, 10-30 ml, 1-20 ml, or 1-10 ml, typically 10-50 ml, prepackaged in a syringe for use.

[0424] In the combination therapies, the other pharmacologic agents, such as a lidocaine/epinephrine/soluble PH20 formulation, can be co-administered together with or in close temporal proximity to the administration of an activatable matrix-degrading enzyme (and activator). Typically it is preferred that an anesthetic and/or dispersion agent be administered shortly before (e.g. 5 to 60 minutes before) or, for maximal convenience, together with the pharmacologic agent. As will be appreciated by those of skill in the art, the desired proximity of co-administration depends in significant part on the effective half lives of the agents in the particular tissue setting, and the particular disease being treated, and can be readily optimized by testing the effects of administering the agents at varying times in suitable models, such as in suitable animal models.

[0425] iv. Modifications of Hyaluronan Degrading Enzymes to Improve Their Pharmacokinetic Properties

[0426] Hyaluronan degrading enzymes can be modified to improve their pharmacokinetic properties, such as increasing their half-life in vivo and/or activities. The modification of hyaluronan degrading enzymes for use in the compositions, combinations and/or methods provided can include attaching, directly or indirectly via a linker, such as covalently or by other stable linkage, a polymer, such as dextran, a polyethylene glycol (pegylation(PEG)) or sialyl moiety, or other such polymers, such as natural or sugar polymers.

[0427] Pegylation of therapeutics is known to increase resistance to proteolysis, increase plasma half-life, and decrease antigenicity and immunogenicity. Covalent or other stable attachment (conjugation) of polymeric molecules, such as polyethylene glycol moiety (PEG), to the hyaluronan degrading enzyme thus can impart beneficial properties to the resulting enzyme-polymer composition. Such properties include improved biocompatibility, extension of protein (and enzymatic activity) half-life in the blood, cells and/or in other tissues within a subject, effective shielding of the protein from proteases and hydrolysis, improved biodistribution, enhanced pharmacokinetics and/or pharmacodynamics, and increased water solubility.

[0428] Exemplary polymers that can be conjugated to the hyaluronan degrading enzyme, include natural and synthetic homopolymers, such as polyols (i.e. poly-OH), polyamines (i.e. poly-NH2) and polycarboxyl acids (i.e. poly-COOH), and further heteropolymers i.e. polymers comprising one or more different coupling groups e.g. a hydroxyl group and amine groups. Examples of suitable polymeric molecules include polymeric molecules selected from among polyalkylene oxides (PAO), such as polyalkylene glycols (PAG), including polypropylene glycols (PEG), methoxypolyethylene glycols (mPEG) and polypropylene glycols, PEG-glycidyl ethers (Epox-PEG), PEG-oxycarbonylimidazole (CDI-PEG) branched polyethylene glycols (PEGs), polyvinyl alcohol (PVA), polycarboxylates, polyvinylpyrrolidone, poly-D,L-amino acids, polyethylene-co-maleic acid anhydride, polystyrene-co-maleic acid anhydride, dextrans including carboxymethyl-dextrans, heparin, homologous albumin, celluloses, including methylcellulose, carboxymethylcellulose, ethylcellulose, hydroxyethylcellulose, carboxyethylcellulose and hydroxypropylcellulose, hydrolysates of chitosan, starches such as hydroxyethyl-starches and hydroxypropyl-starches, glycogen, agaroses and derivatives thereof, guar gum, pullulan, inulin, xanthan gum, carrageenan, pectin, alginic acid hydrolysates and bio-polymers.

[0429] Typically, the polymers are polyalkylene oxides (PAO), such as polyethylene oxides, such as PEG, typically mPEG, which, in comparison to polysaccharides such as dextran, pullulan and the like, have few reactive groups capable of cross-linking. Typically, the polymers are non-toxic polymeric molecules such as (m)polyethylene glycol (mPEG) which can be covalently conjugated to the hyaluronan degrading enzyme (e.g., to attachment groups on the protein surface) using a relatively simple chemistry.

[0430] Suitable polymeric molecules for attachment to the hyaluronan degrading enzyme include, but are not limited to, polyethylene glycol (PEG) and PEG derivatives such as methoxy-polyethylene glycols (mPEG), PEG-glycidyl ethers (Epox-PEG), PEG-oxycarbonylimidazole (CDI-PEG), branched PEGs, and polyethylene oxide (PEO) (see e.g. Roberts et al., Advanced Drug Delivery Review 2002, 54: 459-476; Harris and Zalipsky, S (eds.) “Poly(ethyl ene glycol), Chemistry and Biological Applications” ACS Symposium Series 680, 1997; Mehvar et al., J. Pharm. Pharmaceut. Sci., 3(1):125-136, 2000; Harris, Nature Reviews 2:215 et seq. (2003); and Tsubery, J Biol. Chem 279(37):38118-24, 2004). The polymeric molecule can be of a molecular weight typically ranging from about 3 kDa to about 60 kDa. In some embodiments the polymeric molecule that is conjugated to a protein, such as rHuPH20, has a molecular weight of 5, 10, 15, 20, 25, 30, 35, 40, 45, 50, 55, 60 or more than 60 kDa.

[0431] Various methods of modifying polypeptides by covalently attaching (conjugating) a PEG or PEG derivative (i.e. “PEGylation”) are known in the art (see e.g., U.S. Pat. No. 5,672,662 and U.S. Pat. No. 6,737,505; and U.S. Publication Nos. 2006/0104968 and 2004/0235734). Techniques for PEGylation include, but are not limited to, specialized linkers and coupling chemistries (see e.g., Harris, Adv. Drug Deliv. Rev. 54:459-476, 2002), attachment of multiple PEG moieties to a single conjugation site (such as via use of branched PEGs; see e.g., Veronese et al., Bioorg. Med. Chem. Lett. 12:177-180, 2002), site-specific PEGylation and/or mono-PEGylation (see e.g., Chapman et al., Nature Biotech. 17:780-783, 1999), and site-directed enzymatic PEGylation (see e.g., Sato, Adv. Drug Deliv. Rev., 54:487-504, 2002) (see, also, for example, Lu and Felix (1994) Int. J. Peptide Protein Res. 43:127-138; Lu and Felix (1993) Peptide Res. 6:142-6, 1993; Felix et al. (1995) Int. J. Peptide Res. 46:253-64; Benhar et al. (1994) J. Biol. Chem. 269:13398-404; Brumeanu et al. (1995) J Immunol. 154:3088-95; see also, Caliceti et al. (2003) Adv. Drug Deliv. Rev. 55(10):1261-77 and Molineux (2003) Pharmacotherapy 23 (8 Pt 2):3S-8S). Methods and techniques described in the art can produce proteins having 1, 2, 3, 4, 5, 6, 7, 8, 9, 10 or more than 10 PEG or PEG derivatives attached to a single protein molecule (see e.g., U.S. Publication No. 2006/0104968).

[0432] Numerous reagents for PEGylation have been described in the art. Such reagents include, but are not limited to, N-hydroxysuccinimidyl (NHS) activated PEG, succinimidyl mPEG, mPEG2-N-hydroxysuccinimide, mPEG succinimidyl alpha-methylbutanoate, mPEG succinimidyl propionate, mPEG succinimidyl butanoate, mPEG carboxymethyl 3-hydroxybutanoic acid succinimidyl ester, homobifunctional PEG-succinimidyl propionate, homobifunctional PEG propionaldehyde, homobifunctional PEG butyraldehyde, PEG maleimide, PEG hydrazide, p-nitrophenyl-carbonate PEG, mPEG-benzotriazole carbonate, propionaldehyde PEG, mPEG butryaldehyde, branched mPEG2 butyraldehyde, mPEG acetyl, mPEG piperidone, mPEG methylketone, mPEG “linkerless” maleimide, mPEG vinyl sulfone, mPEG thiol, mPEG orthopyridylthioester, mPEG orthopyridyl disulfide, Fmoc-PEG-NHS, Boc-PEG-NHS, vinylsulfone PEG-NHS, acrylate PEG-NHS, fluorescein PEG-NHS, and biotin PEG-NHS (see e.g., Monfardini et al., Bioconjugate Chem. 6:62-69, 1995; Veronese et al., J Bioactive Compatible Polymers 12:197-207, 1997; U.S. Pat. No. 5,672,662; U.S. Pat. No. 5,932,462; U.S. Pat. No. 6,495,659; U.S. Pat. No. 6,737,505; U.S. Pat. No. 4,002,531; U.S. Pat. No. 4,179,337; U.S. Pat. No. 5,122,614; U.S. Pat. No. 5,183,550; U.S. Pat. No. 5,324,844; U.S. Pat. No. 5,446,090; U.S. Pat. No. 5,612,460; U.S. Pat. No. 5,643,575; U.S. Pat. No. 5,766,581; U.S. Pat. No. 5,795,569; U.S. Pat. No. 5,808,096; U.S. Pat. No. 5,900,461; U.S. Pat. No. 5,919,455; U.S. Pat. No. 5,985,263; U.S. Pat. No. 5,990,237; U.S. Pat. No. 6,113,906; U.S. Pat. No. 6,214,966; U.S. Pat. No. 6,258,351; U.S. Pat. No. 6,340,742; U.S. Pat. No. 6,413,507; U.S. Pat. No. 6,420,339; U.S. Pat. No. 6,437,025; U.S. Pat. No. 6,448,369; U.S. Pat. No. 6,461,802; U.S. Pat. No. 6,828,401; U.S. Pat. No. 6,858,736; U.S. 2001/0021763; U.S. 2001/0044526; U.S. 2001/0046481; U.S. 2002/0052430; U.S. 2002/0072573; U.S. 2002/0156047; U.S. 2003/0114647; U.S. 2003/0143596; U.S. 2003/0158333; U.S. 2003/0220447; U.S. 2004/0013637; US 2004/0235734; U.S. 2005/000360; U.S. 2005/0114037; U.S. 2005/0171328; U.S. 2005/0209416; EP 01064951; EP 0822199; WO 00176640; WO 0002017; WO 0249673; WO 9428024; and WO 0187925).

[0433] In one example, the hyaluronan degrading enzyme for use in the methods, compostions, and combinations provided is a soluble hyaluronidase that is PEGylated. In a particular example, the soluble hyaluronidase is a PEGylated PH20 hyaluronidase. In another particular example, the soluble hyaluronidase is PEGylated rHuPH20. G. PACKAGING AND ARTICLES OF MANUFACTURE OF ACTIVATABLE MATRIX-DEGRADING ENZYMES

[0434] Pharmaceutical compounds of selected matrix-degrading enzymes or nucleic acids encoding selected matrix-degrading enzymes, or a derivative or variant thereof can be packaged as articles of manufacture containing packaging material, a pharmaceutical composition which is effective for treating the disease or disorder, and a label that indicates that selected matrix-degrading enzyme or nucleic acid molecule is to be used for treating the disease or disorder. Combinations of a selected matrix-degrading enzyme, or derivative or variant thereof and an activator also can be packaged in an article of manufacture.

[0435] The articles of manufacture provided herein contain packaging materials. Packaging materials for use in packaging pharmaceutical products are well known to those of skill in the art. See, for example, U.S. Pat. Nos. 5,323,907, 5,052,558 and 5,033,252, each of which is incorporated herein in its entirety. Examples of pharmaceutical packaging materials include, but are not limited to, blister packs, bottles, tubes, inhalers, pumps, bags, vials, containers, syringes, bottles, and any packaging material suitable for a selected formulation and intended mode of administration and treatment. The articles of manufacture can include a needle or other injection device so as to facilitate administration (e.g. sub-epidermal administration) for local injection purposes. A wide array of formulations of the compounds and compositions provided herein are contemplated as are a variety of treatments for any ECM-mediated disease or disorder.

[0436] The choice of package depends on the matrix-degrading enzyme and activator, and whether such compositions will be packaged together or separately. In general, the packaging is non-reactive with the compositions contained therein such that activation of the activatable matrix-degrading enzyme does not occur prior to addition of the activator. In one example, the activatable matrix-degrading enzyme can be packaged as a mixture with the activator. Thus, for example, a lysosomal enzyme (e.g., cathepsin L) that requires low pH for activation can be packaged as a mixture with a buffered acidic solution.

[0437] In another example, the components can be packaged as separate compositions that, upon mixing, result in activation of the matrix-degrading enzyme. For example, a composition containing a matrix-degrading enzyme can be provided separately from, and for use with, a separate composition containing an activator, such as a buffered acidic solution. Thus, in such examples, the activatable matrix-degrading enzyme is packaged in a separate container from the activator, and activation is achieved by exposure to the activator at the users will. Exposure to the activator can occur at any time preceding administration by addition of the activator to the enzyme. For example, the container can have a single compartment containing the matrix-degrading enzyme and being amenable to addition of the activator by the user, for example through an opening in the compartment. Any container or other article of manufacture that is amenable to having a defining space for containment of the matrix-degrading enzyme and that is amenable to simple manipulation to permit addition of the final components necessary for activation is contemplated. The activator is added prior to use. Exposure to the activator also can occur following administration to the interstitium. For example, if heat is the activator, a matrix-degrading enzyme can be administered and the local injection site subjected to heat. In an alternate example, an acidic buffered solution can be administered to the interstitium followed by administration of a matrix-degrading enzyme, for example any requiring acidic pH for activation such as a cathepsin.

[0438] In other examples, the activatable matrix-degrading enzyme is packaged in a container with the activator such that activation of the matrix-degrading enzyme is amenable to activation by the user at will in the container. Generally, examples of such containers include those that have an enclosed, defined space that contains the matrix-degrading enzyme, and a separate enclosed, defined space containing the activator such that the two spaces are separated by a readily removable membrane which, upon removal, permits the components to mix and thereby react, resulting in activation of the protease. Any container or other article of manufacture is contemplated, so long as the matrix-degrading enzyme is separated from the activator. Exposure of the activator to the matrix-degrading enzyme is prior to use. For example, the physical separation means are those that are readily removed by the user, to permit mixing, resulting in activation of the enzyme. For example, an article of manufacture can contain a matrix-degrading enzyme in one compartment and an activator in an adjacent compartment. The compartments are separated by a dividing member, such as a membrane, that, upon compression of the article or manufacture ruptures permitting separated components to mix. For suitable embodiments see e.g, containers described in U.S. Pat. Nos. 3,539,794 and 5,171,081.

[0439] Following are some examples of the packaging requirements of various end uses of activatable matrix-degrading enzymes. These are offered as examples only and in no way are intended as limiting.

[0440] 1. Single Chamber Apparatus

[0441] Among the simplest embodiments herein, are those in which the apparatus contains a single chamber or container and, if needed, ejection means. Single chamber housings or containers include any item in which a matrix-degrading enzyme is included in the container. The matrix-degrading enzyme is housed in the vessel in liquid phase or as a powder or other paste or other convenient composition. The activator component is introduced just prior to use. Prior to use the activator, typically provided as a buffered solution, is added and contacted with the matrix-degrading enzyme to permit mixing and/or reconstitution of the matrix-degrading enzyme. For example, when desired and depending on the matrix-degrading enzyme, a liquid containing Ca²⁺, such as a mixture containing the Ca²⁺ in an appropriate buffer, or an acidic buffered solution, or other solution containing an activating condition, is added to the container. Kits containing the item and the activator also are provided.

[0442] 2. Dual Chamber Apparatus

[0443] An example of an apparatus contemplated for use herein is a dual chamber container. In general, this apparatus has two chambers or compartments thereby maintaining the matrix-degrading enzyme separate from the activator until activation is desired. The apparatus can include a mixing chamber to permit mixing of the components prior to dispensing from the apparatus. Alternatively, mixing can occur by ejection of the activator from one chamber into a second chamber containing the activatable matrix-degrading enzyme. For example, the activatable matrix-degrading enzyme can be provided in lyophilized form, and reconstitution can be achieved by ejection of the activator, such as an acidic buffered solution, from a first chamber into the second chamber containing the lyophilized enzyme.

[0444] In one embodiment, a dual chamber apparatus employs a mechanical pump mechanism in it operation. In such an example, the dispensing apparatus maintains the components in separate chambers. A pump mechanism operated to withdraw the contents from each chamber and into a mixing chamber, or from one chamber into the second chamber. Upon mixing, the mixed composition is activated by reaction of the components in the chambers. The pump mechanism can be manually operated, for example, by a plunger. Exemplary of such dual chamber apparatus include dual chamber syringes (see e.g., U.S. Pat. Nos. 6,972,005, 6,692,468, 5,971,953, 4,529,403, 4,202,314, 4,214,584, 4,983,164, 5,788,670, 5,395,326; and International Patent Application Nos. WO2007006030 and WO2001047584).

[0445] Another embodiment of a dual chamber fluid dispensing apparatus contemplated for use herein takes the form of a compressible bottle or tube or other similar device. The device has two compartments within it that keep the components separated. The cap of the device can serve as a mixing chamber, a mixing chamber can be positioned between the two chambers and the cap, or mixing can be achieved within one of the chambers. The components are forced by compression from the separate compartments into the mixing chamber. They are then dispensed from the mixing chamber. For example, the mixed contents can be removed from the device by attaching a plunger/syringe apparatus to the dispensing end and withdrawing the contents therethrough. Such devices are known in the art (see e.g., International Patent Application. No. WO1994015848).

[0446] 3. Kits

[0447] Selected matrix-degrading enzymes, activators and/or articles of manufacture thereof also can be provided as kits. Kits can include a pharmaceutical composition described herein and an item for administration provided as an article of manufacture. For example a selected matrix-degrading enzyme can be supplied with a device for administration, such as a syringe, an inhaler, a dosage cup, a dropper, or an applicator. The compositions can be contained in the item for administration or can be provided separately to be added later. Generally, kits contain an item with a matrix-degrading enzyme, and an activator composition containing the activating condition. The kit can, optionally, include instructions for application including dosages, dosing regimens and instructions for modes of administration. Kits also can include a pharmaceutical composition described herein and an item for diagnosis. For example, such kits can include an item for measuring the concentration, amount or activity of the selected protease in a subject.

### H. METHODS OF ASSESSING ACTIVITY OF MATRIX-DEGRADING ENZYMES

[0448] 1. Methods of Assessing Enzymatic Activity

[0449] Activatable matrix-degrading enzymes can be tested for their enzymatic activity against known substrates. Activity assessment can be performed in the presence or absence of an activator. Activity assessment also can be performed under varying conditions, for example, by varying the amount of activator used for activation. In one example, pH profiles can be be performed to determine the relative activity of an enzyme under various pH conditions (see e.g., Dehrmann et al. (1995) Arch. Biochm. Biophys., 324:93-98). Activity assessments can be performed on conditioned medium or other supernatants or on purified protein.

[0450] Enzymatic activity can be assessed by assaying for substrate cleavage using known substrates of the enzyme. The substrates can be in the form of a purified protein or provided as peptide substrates. For example, enzymatic activity of cathepsin L can be assessed by cleavage of purified proteins like Azocasein, collagen, elastin, human serum albumin and rHuPH20 either by incubating them individually with the ADME or as a mixture of two or more purified proteins. Cleavage of a purified protein by an enzyme can be assessed using any method of protein detection, including, but not limited to, HPLC, CE, Mass spectrometry, SDS-PAGE analysis, ELISA, Western blotting, immunohistochemistry, immunoprecipitation, NH2-terminal sequencing, and protein labeling.

[0451] The use of fluorogenic groups on the substrates facilitates detection of cleavage. For example, substrates can be provided as fluorogenically tagged tetrapeptides of the peptide substrate, such as an ACC- or 7-amino-4-methyl courmarin (AMC)-tetrapeptide. Other fluorogenic groups are known and can be used and coupled to protein or peptide substrates. These include, for example, 7-amino-4-methyl-2-quinolinone (AMeq), 2-naphthylamine (NHNap) and 7-amino-4-methylcoumarin (NHMec) and fluorescein-5-isothiocyanate (FITC) (Sarath et al. “Protease Assay Methods,” in Proteolytic Enzymes: A Practical Approach. Ed. Robert J. Beynon and Judith S. Bond. Oxford University Press, 2001. pp. 45-76). Peptide substrates are known to one of skill in the art, as are exemplary fluorogenic peptide substrates. For example, exemplary substrates for cathepsin B include, N-OBZ-Phe-Val-Arg-p-NA, DNA-Phe-Arg-Nph-Leu, Z-Ala-Arg-Arg-F³MCA, Z-Arg-Arg-MBNA, Z-Arg-Arg-NHMec, Z-Phe-Arg-NHMec, and Z-Leu-Arg-AMC and variations thereof such as with different fluorogenic groups. In another example, an exemplary substrate for cathepsin L includes Z-Phe-Arg-NHMec and Z-Leu-Arg-AMC, and Z-His-Arg-Tyr-Arg-AMC, and variations thereof such as with different fluorgenic groups. Thus, since cathepsin B and cathepsin L share the same substrate, for example, Z-Phe-Arg-NHMec and Z-Leu-Arg-AMC, activity assessment of cathepsin L can be performed in the presence of a specific inhibitor to cathepsin B. Exemplary of such an inhibitor is CA-074. This is exemplified in Example 9 herein. Enzymes assays to measure enzymatic activity by fluorescence intensity are standard, and are typically performed as a function of incubation time of the enzyme and substrate (see e.g., Dehrmann et al. (1995) Arch. Biochem. Biophys., 324:93-98; Barrett et al. (1981) Methods Enzymol., 80:536-561).

[0452] While detection of fluorogenic compounds can be accomplished using a fluorometer, detection can be accomplished by a variety of other methods well known to those of skill in the art. Thus, for example, when the fluorophores emit in the visible wavelengths, detection can be simply by visual inspection of fluorescence in response to excitation by a light source. Detection also can be by means of an image analysis system utilizing a video camera interfaced to a digitizer or other image acquisition system. Detection also can be by visualization through a filter, as under a fluorescence microscope. The microscope can provide a signal that is simply visualized by the operator. Alternatively, the signal can be recorded on photographic film or using a video analysis system. The signal also can simply be quantified in real time using either an image analysis system or a photometer.

[0453] Thus, for example, a basic assay for enzyme activity of a sample involves suspending or dissolving the sample in a buffer (at the pH and ionic strength optima of the particular protease being assayed) adding to the buffer a fluorogenic enzyme peptide indicator, and monitoring the resulting change in fluorescence using a spectrofluorometer at a specific temperature for incubation as shown in e.g., Harris et al., (1998) J Biol Chem 273:27364. The spectrofluorometer is set to excite the fluorophore at the excitation wavelength of the fluorophore and detect signal at the emission wavelength of the fluorophore. The fluorogenic enzyme indicator is a substrate sequence of a enzyme (e.g. of a protease) that changes in fluorescence due to a protease cleaving the indicator. Enzymatic activity is typically expressed as standard units/ml based on a calibration curve generated with varying concentration of the fluorogenic substrate, and specific activity is represented as units/mg protein.

[0454] 2. Methods of Assessing ECM Degradation

[0455] The degradation of extracellular matrix proteins by matrix-degrading enzymes, including, but not limited to, those described above, such as cathepsin L, can be assessed in vitro or in vivo. Assays for such assessment are known to those of skill in the art, and can be used to test the activities of a variety of matrix-degrading enzymes on a variety of extracellular matrix proteins, including, but not limited to collagen (I, II, III and IV), fibronectin, vitronectin and proteoglycans.

[0456] a. In Vitro Assays

[0457] Exemplary in vitro assays include assays to assess the degradation products of extracellular matrix proteins following incubation with a matrix-degrading enzyme. In some examples, the assays detect a single, specific degradation product. In other examples, the assays detect multiple degradation products, the identity of which may or may not be known. Assessment of degradation products can be performed using methods well known in the art including, but not limited to, HPLC, CE, Mass spectrometry, SDS-PAGE analysis, ELISA, Western blotting, immunohistochemistry, immunoprecipitation, NH2-terminal sequencing, and protein labeling. Extracellular matrix degradation products can be visualized, for example, by SDS-PAGE analysis following incubation with matrix-degrading enzymes for an appropriate amount of time at an appropriate temperature. For example, collagen can be incubated with activated cathepsin L and subjected to SDS-PAGE using, for example, a 4-20% Tris/glycine gel to separate the products. Coomassie staining of the gel facilitates visualization of smaller degradation products, or disappearance of collagen bands, compared to intact collagen. Immunoblotting using, for example, a polyclonal Ig specific to the extracellular matrix protein also can be used to visualize the degradation products following separation with SDS-PAGE.

[0458] Assays that specifically detect a single product following degradation of an extracellular matrix protein also are known in the art and can be used to assess the ability of a matrix-degrading enzyme to degrade an extracellular matrix protein. For example, the hydroxyproline (HP) assay can be used to measure degradation of collagen. 4-hydroxyproline is a modified imino acid that makes up approximately 12% of the weight of collagen. HP assays measure the amount of solubilized collagen by determining the amount of HP in the supernatant following incubation with a matrix-degrading enzyme, such as activated cathepsin L (see e.g., Example 2, below, and Reddy and Enwemeka (1996) Clinical Biochemistry 29:225-229). Measurement of HP can be effected by, for example, calorimetric methods, high performance liquid chromatography, mass spectrometry and enzymatic methods (see e.g., Edwards et al., (1980) Clin. Chim. Acta 104:161-167; Green (1992) Anal. Biochem. 201:265-269; Tredget et al., (1990) Anal. Biochem. 190:259-265; Ito et al., (1985) Anal. Biochem. 151:510-514; Garnero et al. (1998) J. Biol. Chem 273:32347-32352).

[0459] The collagen source used in such in vitro assays can include, but is not limited to, commercially available purified collagen, bone particles, skin, cartilage and rat tail tendon. Collagenolytic activity of a matrix-degrading enzyme such as cathepsin L can be assessed by incubating the activated enzyme with an insoluble collagen suspension, followed by hydrolysis, such as with HCl. The amount of hydroxyproline derived from the solubilized (degraded) collagen can be determined by spectrophotometric methods, such as measuring the absorbance at 550 nm following incubation with Ehrlich's reagent. In some examples, the collagen source is rat or pig skin explant that is surgically removed from anesthetized animals and then perfused with first an acidic solution and then the matrix-degrading enzyme, such as cathepsin L (see e.g. Examples 3-4, below). HP levels in the perfusates can then be assessed. In a modification of this method, the effect of, for example, cathepsin L on the fibrous septae in the explants can be assessed (see e.g. Example 5). Briefly, following perfusion with the matrix degrading enzyme, the explants are cut into small pieces and embedded in paraffin and analyzed by microscopy following Masson's Trichrome staining for visualization of collagen. The number of collagen fibrous septae can be visualized and compared to tissue that has not been treated with a matrix degrading enzyme.

[0460] Assays to detect degradation of specific collagens also are known in the art. Such assays can employ immunological methods to detect a degradation product unique to the specific collagen. For example, the degradation of collagen I by some matrix-degrading enzymes releases telopeptides with different epitopes that can be detected using immunoassays. Such assays detect the cross-linked N-telopeptides (NTx) and the cross-linked C-telopeptides (CTx and ICTP), each of which contain unique epitopes. Typically, CTx assays utilize the CrossLaps (Nordic Biosciences) antibodies that recognize the 8 amino acid sequence EKAHD-β-GGR octapeptide, where the aspartic acid is in β-isomerized configuration, in the C-terminal telopeptide region of the α1 chain (Eastell (2001) Bone Markers: Biochemical and Clinical Perspectives, pg 40). Immunoassays to detect ICTP also are known in the art and can be used to detect degradation of collagen I (U.S. Pat. No. 5,538,853). In other examples, immunoassays, such as, for example, ELISAs, can be used to detect NTx following incubation of collagen type I with proteases such as Cathepsins K, S, L and B (Atley et al., (2000) Bone, 26:241-247). Other antibodies and assays specific for degraded collagens are known in the art and can be used to detect degradation by matrix-degrading enzymes. These include antibodies and assays specific for degraded collagen I (Hartmann et al (1990) Clin. Chem. 36:421-426), collagen II (Hollander et al (1994) J. Clin. Invest. 93:1722-1732), collagen III (U.S. Pat. No. 5,34,2756), and collagen IV (Wilkinson et al (1990) Anal. Biochem. 185:294-6).

[0461] b. In Vivo Assays

[0462] Assays to detect the in vivo degradation of ECM also are known in the art. Such assays can utilize the methods described above to detect, for example, hydroxyproline and N- and C-telopeptides and degraded collagens or other ECM in biological samples such as urine, blood, serum and tissue. Detection of degraded ECM can be performed following administration to the patient of one or more matrix-degrading enzymes. Detection of pyridinoline (PYD) and deoxypyridinoline (DPYD), also can be used to assess degradation of collagen. Also known as hydroxylysylpyridinoline and lysylpyridinoline, respectively, PYD and DPYD are the two nonreducible trivalent cross-links that stabilize type I collagen chains and are released during the degradation of mature collagen fibrils. Pyridinoline is abundant in bone and cartilage, whereas deoxypyridinoline is largely confined to bone. Type III collagen also contains pyridinoline cross-links at the amino terminus. Total PYD and DPYD can be measured, for example, in hydrolyzed urine samples or serum by fluorimetric detection after reversed-phase HPLC (Hata et al (1995) Clin. Chimica. Acta. 235:221-227).

[0463] c. Non-Human Animal Models

[0464] Non-human animal models can be used to assess the activity of matrix-degrading enzymes. For example, non-human animals can be used as models for a disease or condition. Non-human animals can be injected with disease and/or phenotype-inducing substances prior to administration of matrix-degrading enzymes. Genetic models also are useful. Animals, such as mice, can be generated which mimic a disease or condition by the overexpression, underexpression or knock-out of one or more genes. For example, animal models are known in the art for conditions including, but not limited to, Peyronie's Disease (Davila et al. (2004) Biol. Reprod., 71:1568-1577), tendinosis (Warden et al., (2006) Br. J. Sports Med. 41:232-240) and scleroderma (Yamamoto (2005) Cur. Rheum. Rev. 1: 105-109).

[0465] Non-human animals also can be used to test the activity of matrix-degrading enzymes in vivo in a non-diseased animal. For example, matrix-degrading enzymes can be administered to, non-human animals, such as, a mouse, rat or pig, and the level of ECM degradation can be determined. In some examples, the animals are used to obtain explants for ex vivo assessment of ECM degradation, such as that described above and in Examples 3-5, below. In other examples, ECM degradation is assessed in vivo. In one example, collagen degradation of the skin of anesthetized rats is assessed (see e.g. Example 6 below). Briefly, a matrix degrading enzyme, such as cathepsin L in a buffer with a pH of 5, is perfused via insertion of a needle into the dermal layer of the skin of the tail. Perfusate fractions are collected from the tail skin and analyzed for collagen degradation by hydroxyproline analysis. Other methods can be used to detect degradation including, but not limited to, any of the assays described above, such as immunoassays to detect specific degradation products. The effect of administering an acidic solution, such as the buffer containing cathepsin L that facilitates optimal activity, to the skin also can be assessed in a non-human animal model (see e.g. Example 7). Dyes sensitive to pH change, such as phenol red, can be used for these purposes.

### I. EXEMPLARY METHODS OF TREATING DISEASES OR DEFECTS OF ECM

[0466] The activatable matrix degrading enzymes provided herein can be used for treatment of any condition mediated by any one or more ECM components. This section provides exemplary uses of, and administration methods for, activatable matrix-degrading enzymes. These described therapies are exemplary and do not limit the applications of enzymes. Such methods include, but are not limited to, methods of treatment of any ECM condition or disease that is caused by excess, aberrant or accumulated expression of any one or more ECM component. Exemplary of diseases or conditions to be treated are any mediated by collagen, elastin, fibronectin, or a glycosaminoglycan such as a proteoglycan. For example, exemplary of collagen-mediated diseases or disorders include, but are not limited to, cellulite, Dupuytren's disease (also called Dupuytren's contracture), Peyronie's disease, frozen shoulder, chronic tendinosis or scar tissue of the tendons, localized scleroderma and lymphedema. It is within the skill of a treating physician to identify such diseases or conditions.

[0467] The particular disease or condition to be treated dictates the activatable matrix-degrading enzyme that is selected. For example, treatment of a collagen-mediated disease or disorder can be effected by administration of matrix-degrading enzyme that cleaves collagen. Such matrix-degrading enzymes are listed above in Table 3, and/or known to one of skill in the art. Activatable matrix-degrading enzymes, and systems and methods for activation can be chosen accordingly to treat a particular disease or condition. For example, cathepsins of the cysteine and aspartic families can be made temporally active by acidic pH conditions as described herein. Thus, in one example, a cathepsin that cleaves a collagen, for example, cathepsin L, can be administered in the presence of an activating condition, such as acidic pH, to treat a collagen-mediated disease or condition.

[0468] Treatment of diseases and conditions with activatable matrix-degrading enzymes can be effected by any suitable route of administration using suitable formulations as described herein including, but not limited to, subcutaneous injection, intramuscular, intradermal, oral, and topical and transdermal administration. As described above, a route of administration of activatable matrix-degrading enzymes typically is chosen that results in administration under the skin directly to the affected site. Exemplary of such routes of administration include, but are not limited to, subcutaneous, intramuscular, or intradermal.

[0469] If necessary, a particular dosage and duration and treatment protocol can be empirically determined or extrapolated. For example, exemplary doses of recombinant and native active matrix-degrading enzymes or activatable matrix-degrading enzymes can be used as a starting point to determine appropriate dosages. Dosage levels can be determined based on a variety of factors, such as body weight of the individual, general health, age, the activity of the specific compound employed, sex, diet, time of administration, rate of excretion, drug combination, the severity and course of the disease, and the patient's disposition to the disease and the judgment of the treating physician. The amount of active ingredient that can be combined with the carrier materials to produce a single dosage form will vary depending upon the particular matrix-degrading enzyme, the host treated, the particular mode of administration, and the activating condition required for activation, and/or the predetermined or length of time in which activation is desired. The pharmaceutical compositions typically should provide a dosage of from about 1 μg/ml to about 20 mg/ml. Generally, dosages are from or about 10 μg/ml to 1 mg/ml, typically about 100 μg/ml, per single dosage administration. It is understood that the amount to administer will be a function of the activatable matrix-degrading enzyme and the activating condition chosen, the indication treated, and possibly side effects that will be tolerated. Dosages can be empirically determined using recognized models for each disorder. Also, as described elsewhere herein, activatable matrix-degrading enzymes can be administered in combination with other agents sequentially, simultaneously or intermittently. Exemplary of such agents include, but are not limited to, lidocaine, epinephrine, a dispersing agent such as hyaluronidase and combinations thereof.

[0470] Upon improvement of a patient's condition, a maintenance dose of a compound or compositions can be administered, if necessary; and the dosage, the dosage form, or frequency of administration, or a combination thereof can be modified. In some cases, a subject can require intermittent treatment on a long-term basis upon any recurrence of disease symptoms.

[0471] Descriptions of the involvement of collagen to collagen-mediated diseases or conditions is provided below as an example of the role of ECM components in diverse disease and conditions. Such descriptions are meant to be exemplary only and are not limited to a particular activatable matrix-degrading enzyme or to a particular ECM-mediated diseases or conditions. One of skill in the art can select an activatable matrix-degrading enzyme and activating condition for activation thereof, to be used in the treatment of any desired ECM-mediated disease, based on the ability of a particular enzyme to cleave or degrade an ECM component involved in the particular disease or condition. The particular treatment and dosage can be determined by one of skill in the art. Considerations in assessing treatment include, for example, the disease to be treated, the ECM component involved in the disease, the severity and course of the disease, whether the activatable matrix-degrading enzyme is administered for preventive or therapeutic purposes, previous therapy, the patient's clinical history and response to therapy, and the discretion of the attending physician.

[0472] 1. COLLAGEN-MEDIATED DISEASES OR CONDITIONS

[0473] Collagen is a major structural constituent of mammalian organisms and makes up a large portion of the total protein content of the skin and other parts of the animal body. Numerous diseases and conditions are associated with excess collagen deposition, for example, due to erratic accumulation of fibrous tissue rich in collagen or other causes. Collagen-mediated diseases or conditions (also referred to as fibrotic tissue disorders) are known to one of skill in the art (see e.g., published U.S. Application No. 20070224183; U.S. Pat. Nos. 6,353,028; 6,060,474; 6,566,331; 6,294,350). Excess collagen has been associated with diseases and conditions, such as, but not limited to, fibrotic diseases or conditions resulting in scar formation, cellulite, Dupuytren's syndrome, Peyronie's disease, frozen shoulder, localized scleroderma, lymphedema, Interstitial cystitis (IC), Telangrectase, Barrett's metaplasia, Pneumatosis cytoides intestinalis, collagenous colitis. For example, disfiguring conditions of the skin, such as wrinkling, cellulite formation and neoplastic fibrosis result from excessive collagen deposition, which produces unwanted binding and distortion of normal tissue architecture.

[0474] Activatable matrix-degrading enzymes described herein, including but not limited to cathepsin L, can be used to treat collagen-mediated diseases or conditions. Exemplary of activatable matrix degrading enzymes for treatment of diseases and conditions described herein are those that are active at neutral pH, and require sustained acidic conditions for activity. For example, temporary acidification of the extracellular matrix, such as the skin interstitium, can be achieved by infusing a buffered acidic solution directly at the affected site. In one example, a buffered acid solution can be administered via sub-epithelium administration, i.e. under the skin, such that administration is effected directly at the site where ECM components are present and accumulated. Other methods of activation can be employed, and are known to one of skill in the art in view of the descriptions herein.

[0475] a. Cellulite

[0476] Activatable matrix-degrading enzymes, such as those described herein, including cathepsin L, can be used to treat cellulite. In normal adipose tissues, a fine mesh of blood vessels and lymph vessels supplies the tissue with necessary nutrients and oxygen, and takes care of the removal of metabolized products. For example, triglycerides are stored in individual adipocytes that are grouped into capillary rich lobules. Each fat lobule is composed of adipocytes. Vertical strands of collagen fibers named fibrous septae separate the fat lobules and tether the overlying superficial fascia to the underlying muscle.

[0477] Cellulite is typically characterized by dermal deterioration due to a breakdown in blood vessel integrity and a loss of capillary networks in the dermal and subdermal levels of the skin. The vascular deterioration tends to decrease the dermal metabolism. This decreased metabolism hinders protein synthesis and repair processes, which results in dermal thinning. The condition is further characterized by fat cells becoming engorged with lipids, swelling and clumping together, as well as excess fluid retention in the dermal and subdermal regions of the skin. The accumulation of fat globules or adipose cells creates a need for a bigger blood supply to provide extra nourishment. To provide the blood to tissues, new capillaries are formed, which release more filtrate resulting in a saturation of tissues with interstitial fluid causing edema in the adipose tissues. Abundant reticular fibers in the interstitial tissues accumulate and thicken around the aggregated adipose cells; they form capsules or septa, which gradually transform into collagen fibers and are felt as nodules. The formation of these septa further occludes fat cells. Collagen fibers are also laid down in the interstitial tissue spaces, rendering the connective tissue sclerotic (hard).

[0478] Hence, as the condition further progresses, hard nodules of fat cells and clumps of fats surrounded by septa form in the dermal region. This leads to the surface of the skin displaying considerable heterogeneity and being characterized as having a “cottage cheese” or “orange peel” appearance. The dimpling occurs when the fibrous septae that connect the skin to the dermis and deeper tissue layers tighten and pull in the skin. Thus, the “orange peel” appearance of cellulite is due to the deformation of the fat lobules as a result of outward forces on the adipose tissue. The fat lobules can be large, for example up to 1 cm wide, and easily protrude into the overlying dermis, causing a visible deformation on the surface of the skin. The net result is the undulating appearance of the outer skin as the fat pushes upwards. As the connective septae run in the same direction as these outward forces, they can offer no counter force to keep the adipose from protruding into the dermis.

[0479] Cellulite is more prevalent among females than males. The prevalence of cellulite is estimated between 60% and 80% of the female population and its severity tends to worsen with obesity. Recently, a published study showed by in vivo magnetic resonance imaging that women with cellulite have a higher percentage of perpendicular fibrous septae than women without cellulite or men (Querleux et al., (2002) Skin Research and Technology, 8:118-124). Cellulite occurs most often on the hips, thighs and upper arms. For example, premenopausal females tend to accumulate fat subcutaneously, primarily in the gluteal/thigh areas where cellulite is most common. Clinically, cellulite is accompanied by symptoms that include thinning of the epidermis, reduction and breakdown of the microvasculature leading to subdermal accumulations of fluids, and subdermal agglomerations of fatty tissues.

[0480] b. Dupuytren's Disease

[0481] Activatable matrix-degrading enzymes, such as those described herein, can be used to treat Dupuytren's syndrome (also called Dupuytren's contracture). Dupuytren's contracture (also known as Morbus Dupuytren) is a fixed flexion contracture of the hand where the fingers bend towards the palm and cannot be fully extended. A similar lesion sometimes occurs in the foot. The connective tissue within the hand becomes abnormally thick and is accompanied by the presence of nodules containing fibroblasts and collagen, particularly type III collagen. The fibrous cord of collagen is often interspersed with a septa-like arrangement of adipose tissue. These present clinically as mattress-type “lumps” of varying sized and in Dupuytren's disease are termed nodules. This can cause the fingers to curl, and can result in impaired function of the fingers, especially the small and ring fingers. Dupuytren's disease occurs predominantly in men. It is generally found in middle aged and elderly persons, those of Northern European ancestry, and in those with certain chronic illnesses such as diabetes, alcoholism and smoking.

[0482] Dupuytren's disease is a slowly progressive disease that occurs over many years causing fixed flexion deformities in the metacarpophalangeal (MP) and proximal interphalangeal (PIP) joints of the fingers. The small and ring fingers are the most often affected. The disease progresses through three stages (Luck et al. (1959) J. Bone Joint Surg., 41A:635-664). The initial proliferative stage is characterized by nodule formation in the palmar fascia in which a cell known as the myofibroblast appears and begins to proliferate. The involutional or mid-disease stage involves myofibroblast proliferation and active type III collagen formation. In the last or residual phase, the nodule disappears leaving acellular tissue and thick bands of collagen. The ratio of type III collagen to type I collagen increases. Treatment of Dupuytren's disease with an activatable-matrix degrading enzyme is typically in the mid-disease and residual disease stages.

[0483] c. Peyronie's Disease

[0484] Activatable matrix-degrading enzymes, such as those described herein, can be used to treat Peyronie's disease. Peyronie's disease is a connective tissue disorder involving the growth of fibrous plaques in the soft tissue of the penis affecting as many as 1-4% of men. Collagen is the major component of the plaque in Peyronie's disease. Specifically, the fibrosing process occurs in the tunica albuginea, a fibrous envelope surrounding the penile corpora cavemosa. The pain and disfigurement associated with Peyronie's disease relate to the physical structure of the penis in which is found two erectile rods, called the corpora cavernosa, a conduit (the urethra) through which urine flows from the bladder, and the tunica which separates the cavernosa from the outer layers of skin of the penis. A person exhibiting Peyronie's disease will have formation(s) of plaque or scar tissue between the tunica and these outer layers of the skin (referred to as “sub-dermal” in this application). The scarring or plaque accumulation of the tunica reduces its elasticity causes such that, in the affected area, it will not stretch to the same degree (if at all) as the surrounding, unaffected tissues. Thus, the erect penis bends in the direction of the scar or plaque accumulation, often with associated pain of some degree. In all but minor manifestations of Peyronie's disease, the patient has some degree of sexual dysfunction. In more severe cases, sexual intercourse is either impossible, or is so painful as to be effectively prohibitive.

[0485] Empirical evidence indicates an incidence of Peyronie's disease in approximately one percent of the male population. Although the disease occurs mostly in middle-aged men, younger and older men can acquire it. About 30 percent of men with Peyronie's disease also develop fibrosis (hardened cells) in other elastic tissues of the body, such as on the hand or foot. Common examples of such other conditions include Dupuytren's contracture of the hand and Ledderhose Fibrosis of the foot.

[0486] d. Ledderhose Fibrosis

[0487] Activatable matrix-degrading enzymes, such as those described herein, can be used to treat Ledderhose fibrosis. Ledderhose fibrosis is similar to Dupuytren's disease and Peyronie's disease, except that the fibrosis due to fibroblast proliferation and collagen deposition occurs in the foot. Ledderhose disease is characterized by plantar fibrosis over the medial sole of the foot, and is sometimes referred to as plantar fibrosis.

[0488] e. Stiff Joints

[0489] Activatable matrix-degrading enzymes, such as those described herein, can be used to treat stiff joints, for example, frozen shoulder. Frozen shoulder (adhesive capsulitis) is a chronic fibrozing condition of the capsule of the joint characterized by pain and loss of motion or stiffness in the shoulder. It affects about 2% of the general population. Frozen shoulder results from increased fibroblast matrix synthesis. The sythesis is caused by an excessive inflammatory response resulting in the overproduction of cytokines and growth factors. Fibroblasts and myofibroblasts lay down a dense matrix of collagen in particular, type-I and type-III collagen within the capsule of the shoulder. This results in a scarred contracted shoulder capsule and causes joint stiffness.

[0490] Other examples of stiff joints include, but are not limited to, those caused by capsular contractures, adhesive capsulitis and arthrofibrosis, which result from musculoskeletal surgery. Such stiff joints can occur in joints, including, for example, joints of the knees, shoulders, elbows, ankles and hips. Like frozen shoulder, such joint diseases are caused by increased matrix synthesis and scar formation. The stiff joints inevitably can cause abnormally high forces to be transmitted to the articular cartilage of the affected area. Over time, these forces result in the development of degenerative joint disease and arthritis. For example, in arthrofibrosis and capsular contracture, fibroblasts form excessive amounts of matrix in response to local trauma, such as joint dislocation.

[0491] f. Existing Scars

[0492] Activatable matrix-degrading enzymes, such as those described herein, can be used to treat existing scars. Collagen is particularly important in the wound healing process and in the process of natural aging, where it is produced by fibroblast cells. In some cases, however, an exaggerated healing response can result in the production of copious amounts of healing tissue (ground substance), also termed scar tissue. For example, various skin traumas such as burns, surgery, infection, wounds and accident are often characterized by the erratic accumulation of fibrous tissue rich in collagen. There also is often an increased proteoglycan content. In addition to the replacement of the normal tissue that has been damaged or destroyed, excessive and disfiguring deposits of new tissue sometimes form during the healing process. The excess collagen deposition has been attributed to a disturbance in the balance between collagen synthesis and collagen degradation. Including among scars are, for example, chronic tendinosis or scar tissue of the tendons, surgical adhesions, keloids, hypertrophic scars, and depressed scars.

[0493] i. Surgical Adhesions

[0494] Surgical adhesions are attachments of organs or tissues to each other through scar formation, which can cause severe clinical problems. The formation of some scar tissue after surgery or tissue injury is normal. In some cases, however, the scar tissue overgrows the region of injury and creates surgical adhesions, which tend to restrict the normal mobility and function of affected body parts. In particular, fibroblast proliferation and matrix synthesis is increased locally following such soft tissue injury. Adhesions then form when the body attempts to repair tissue by inducing a healing response. For example, this healing process can occur between two or more otherwise healthy separate structures (such as between loops of bowel following abdominal surgery). Alternately, following local trauma to a peripheral nerve, fibrous adhesions can form, resulting in severe pain during normal movement.

[0495] ii. Keloids

[0496] Keloids are scars of connective tissue containing hyperplastic masses that occur in the dermis and adjacent subcutaneous tissue, most commonly following trauma. Keloids generally are fibrous nodules that can vary in color from pink or red to dark brown. Keloids form in scar tissue as a result of overgrowth of collagen, which participates in wound repair. Keloid lesions are formed when local skin fibroblasts undergo vigorous hyperplasia and proliferation in response to local stimuli. The resulting lesion can result in a lump many times larger than the original scar. In addition to occur as a result of wound or other trauma, keloids also can form from piercing, pimples, a scratch, severe acne, chickenpox scarring, infection at a wound site, repeated trauma to an area, or excessive skin tension during wound closure.

[0497] iii. Hypertrophic Scars

[0498] Hypertrophic scars are raised scars that form at the site of wounds. They generally do not grow beyond the boundaries of the original wound. Like keloid scars, hypertrophic scars are a result of the body overproducing collagen.

[0499] iv. Depressed Scars

[0500] Depressed scars generally result from an inflammatory episode and are characterized by contractions of the skin, and leave a cosmetically displeasing and permanent scar. The most common example is scarring that occurs following inflammatory acne. The depression occurs as a normal consequence of wound healing, and the scar tissue causing the depression is predominantly made up of collagen resulting from fibroblast proliferation and metabolism.

[0501] g. Scleroderma

[0502] Activatable matrix-degrading enzymes, such as those described herein, can be used to treat scleroderma. Scleroderma is characterized by a thickening of the collagen. The more common form of the disease, localized scleroderma, affects only the skin, usually in just a few places, and sometimes the face. It is sometimes referred to as CREST syndrome. Symptoms include hardening of the skin and associated scarring. The skin also appears reddish or scaly, and blood vessels can be more visible. In more serious cases, scleroderma can affect the blood vessels and internal organs. Diffuse scleroderma can be fatal as a result of heart, kidney lung or intestinal damage, due to musculoskeletal, pulmonary, gastrointestinal, renal and other complications.

[0503] The condition is characterized by collagen buildup leading to loss of elasticity. The overproduction of collagen has been attributed to autoimmune dysfunction, resulting in accumulation of T cells and production of cytokines and other proteins that stimulate collagen deposition from fibroblasts.

[0504] h. Lymphedema

[0505] Activatable matrix-degrading enzymes, such as those described herein, can be used to treat lymphedema. Lymphedema is an accumulation of lymphatic fluid that causes swelling in the arms and legs. Lymphedema can progress to include skin changes such as, for example, lymphostatic fibrosis, sclerosis and papillomas (benign skin tumors) and swelling. Tissue changes associated with lymphedema include proliferation of connective tissue cells, such as fibroblasts, production of collagen fibers, an increase in fatty deposits and fibrotic changes. These changes occur first at the lower extremities, i.e. the fingers and toes. Lymphedema can be identified based on the degree of enlargement of the extremities. For example, one method to assess lymphedema is based on identification of 2-cm or 3-cm difference between four comparative points of the involved and uninvolved extremities.

[0506] i. Collagenous Colitis

[0507] Activatable matrix-degrading enzymes, such as those described herein, can be used to treat collagenous colitis. Collagenous colitis was first described as chronic watery diarrhea (Lindstrom et al. (1976) Pathol. Eur., 11:87-89). Collagenous colitis is characterized by collagen deposition, likely resulting from an imbalance between collagen production by mucosal fibroblasts and collagen degradation. It results in secretory diarrhea. The incidence of collagenous colitis is similar to primary biliary cirrhosis. The disease has an annual incidence of 1.8 per 100,000 and a prevalence of 15.7 per 100,000, which is similar to primary biliary cirrhosis (12.8 per 100,000) and lower than ulcerative colitis (234 per 100,000), Crohn's disease (146 per 100,000) or celiac disease (5 per 100,000). In patients with chronic diarrhea, about 0.3 to 5% have collagenous colitis. Collagenous colitis is an inflammatory disease resulting in increased production of cytokines and other agents that stimulate the proliferation of fibroblasts, resulting in increased collagen accumulation.

[0508] 2. Spinal Pathologies

[0509] Diseases of the ECM or involving the ECM also include spinal pathologies, typically referred to as herniated disc or bulging discs, that can be treated using the methods herein. These include protruded and extruded discs. A protruded disc is one that is intact but bulging. In an extruded disk, the fibrous wrapper has torn and the nucleus pulposus (NP) has oozed out, but is still connected to the disk. While the NP is not the cause of the herniation, the NP contributes to pressure on the nerves causing pain. The NP contains hyaluronic acid, chondrocytes, collagen fibrils, and proteoglycan aggrecans that have hyaluronic long chains which attract water. Attached to each hyaluronic chain are side chains of chondroitin sulfate and keratan sulfate.

[0510] Herniated discs have been treated with chemonucleolytic drugs, such as chymopapain and a collagenase, typically by local introduction of the drug into the disc. A chemonucleolytic drug degrades one or more components of the NP, thereby relieving pressure. Chemonucleolysis is effective on protruded and extruded disks. Chemonucleolysis has been used treat lumbar (lower) spine and cervical (upper spine) hernias. For the methods herein, any enzyme that degrades a component of the NP and that is conditionally activated can be administered. These enzymes include cathepsin L. In addition, any of the hyaluronidases, collagenases, chondroitinases that are not conditionally activatable, can be modified to render them so. For example, temperature sensitive enzymes, as described herein, including modified MMPs, such as MMP-1 modified as described herein can be employed in the methods herein.

### J. EXAMPLES

[0511] The following examples are included for illustrative purposes only and are not intended to limit the scope of the invention.

### Example 1

### Preparation of Activated Recombinant Cathepsin-L

[0512] Histidine (His)-tagged purified recombinant human cathepsin-L was purchased from R&D systems (Minneapolis, Minn. Cat# 952-CY) and was formulated at a concentration of 0.9 mg/mL in 50 mM Acetate, pH 4.0, 100 mM NaCl. Aliquots of 500 μL were stored at −80° C. until they were used.

[0513] Concentration and buffer exchange were performed on stored aliquots before use. Briefly, 2 mL of 0.9 mg/mL cathepsin-L was thawed on ice and 500 μL transferred to 4 microcon centrifugal filter membrane tubes having a 30 KDa cut-off (Millipore; Bedford, Mass., Cat#42410). The microcon tubes were spun at 9000 rpm for 5 minutes resulting in a final volume of 50 μl. 450 μL of cold concentration buffer (100 mM Na-Formate pH 4, 100 mM NaCl, 5 mM DTT, 10 mM EDTA) was added to each micron tube. The addition of 5 mM DTT during processing converts cathepsin-L to a single chain protein of approximately 36 KDa as assessed by SDS-PAGE. The concentration and buffer exchange steps remove the inhibitory 10-16 KDa pro-peptide. In addition, the DTT and EDTA added during concentration and buffer exchange minimize proteolytic degradation of cathepsin-L. The centrifugation procedure was repeated three times. Tubes and concentration solutions were chilled to minimize degradation, since cathepsin-L is sensitive to temperature. After the final spin, the microcon tubes were inverted and the liquid was collected in the retentate cup by centrifugation at 5000 rpm for 5 minutes. The final volume recovered was 400 μL, resulting in a five-fold concentration. The concentrated cathepsin-L was aliquoted in volumes of 67 μL, which contained approximately 300 μg of activated enzyme. Aliquots were stored at −80° C., and thawed on ice prior to use.

[0514] Before use, cathepsin-L was formulated at its optimal pH of 5 by adding one aliquot to 3 mL of MES buffer solution (2-(N-morpholino)ethanesulfonic acid) at pH 5, resulting in a final concentration of 100 μg/mL of activated cathepsin-L. As a control, cathepsin-L was formulated in HEPES buffer at pH 7.4 where the enzyme is minimally active.

### Example 2

### Hydroxyproline Assay

[0515] A hydroxyproline assay was used to measure collagen content changes in skin samples following perfusion with cathepsin-L. While the hydroxyproline content of other proteins is negligible, collagen contains hydroxyproline at a concentration of 8% (T V. Burjanadze, Hydroxyproline content and location in relation to collagen thermal stability. Biopolymers 18: 4931-4938 (2002)). The hydroxyproline (HP) assay used was a modification of the procedure of Reddy and Enwemeka (Clinical Biochemistry 29:225-229 (1996)).

[0516] In particular, the volumes of the reagents were modified for completion of the reaction in 8-well 0.2 mL strip tubes (Brandtech, Essex, Conn.) in a standard thermocycler (Eppenforf Mastercycler, Westbury, N.Y.). All steps including hydrolyzation, acidification and detection with Ehrlich's reagent were carried out in the 0.2 mL tubes. All chemicals were purchased from Sigma (St. Louis, Mo.). Briefly, perfusate samples from perfusion experiments were extracted by precipitation with 5 volumes of 200 proof ethanol and centrifuged. The volumes of perfusate collected were measured using 1 mL or 200 μL pipettes. The perfusates were transferred to labeled 15 mL conical centrifuge tubes. The ethanol perfusate mixtures were stored in a −80° C. freezer for 30 minutes before being centrifuged at 3000 rpm for 10 minutes in an Eppendorf swinging bucket centrifuge. Following centrifugation, the precipitate was dissolved in 150-400 μL of 2N NaOH depending on the size of the pellet. The supernatant was dried in a lyophilizer, and dissolved in 150-200 μL of 2N NaOH. Following dissolution in NaOH, samples were transferred to 8-well strip tubes at a volume of 200 μL or less per tube and hydrolyzed at 99° C. for 12 hours in a thermocycler to allow for complete hydrolysis of collagen and hydroxyproline release. Samples were acidified with concentrated HCl (5.2 μL of HCl per every 25 μL of hydrolyzed sample). 60 μL of Chloramine-T (Sigma; Cat# C9887) were added to an equal volume of acidified hydrolysate to complete hydroxyproline oxidation. After complete oxidation, 120 μL of Ehrlich's reagent (Sigma, Saint Louis, Mo., Cat# 39070(Fluka)) was added and incubated at 65° C. for 25 minutes, resulting in a purple color. The intensity of the coloration is dependent on the amount of hydroxyproline derived from the collagen released in the perfusate. Samples were read in the visible range at 550 nm in a Spectramax 2E plate reader (Molecular Devices, Sunnyvale, Calif.). A standard curve was established using purified hydroxyproline solution (Sigma, Saint Louis, Mo., Cat# H54409), and hydroxyproline content in skin samples were determined from the standard curve.

### Example 3

### Degradation of Collagen by Perfusion of Ex Vivo Rat Skin Explants with Activated Cathepsin-L

[0517] Skin explants (2 cm×2 cm) were surgically removed from the dorsolateral site of 3-month old male Sprague-Dawley rats (Harlan Sprague Dawley, Indianapolis, Ind.) anesthetized with 2% isofluorane. Explants were pinned down with needles to a Styrofoam pad glued to a 100 mm Petri dish and kept at 37° C. with a heating pad. Using an infusion pump (Thermo Orion, model M361, Boston, Mass.), 6 mL of a solution containing MES buffer (2-(N-morpholino-ethanesulfonic acid) at pH 5 and rHuPH20 at 2500 Units/mL (rHuPH20 Halozyrne internal manufacturing lot# 056-100; specific activity: 124,000 U/mL and protein content of 1.05 mg/mL) were first perfused for 35 minutes through the skin explants via a 27-gauge butterfly needle inserted into the dermal layer of the explants. After completion of the acidic perfusion, the skin explants were perfused for approximately 30 minutes with or without 100 μg/mL of activated cathepsin-L in MES buffer, pH 5 or control cathepsin-L in HEPES buffer, pH 7.4. Fractions were collected by aspirating with a 200 μL micropipette and collecting the contents in 1.5 mL Eppendorf tubes at time intervals of 5-10 minutes during the entire perfusion procedure. The fractions were pooled in Eppendorf tubes and rapidly frozen until hydroxyproline (HP) analysis was performed as described in Example 2.

[0518] The results of three different experiments show that HP levels were significantly increased only in samples perfused with activated cathepsin-L at the optimum pH of 5. Average (n=3) HP levels increased from less than 1 μg/mL of perfusate at approximately 6 minutes to more than 30 μg/mL of perfusate at approximately 30 minutes. None or little HP was measured in the perfusates from infusions with MES buffer pH 5 only; HEPES buffer pH 7.4 only; and control cathepsin-L at pH 7.4.

### Example 4

### Degradation of Collagen by Perfusion of Ex Vivo Pig Skin Explants with Activated Cathepsin-L

[0519] Three-month old female Yorkshire pigs (S and S Farm, Ramona, Calif.) were fasted overnight and anesthetized by intramuscular injection of Ketamine (20 mg/kg)/Xylazine (2 mg/kg) and atropine (0.04 mg/kg). Animals were then intubated and anesthesia was maintained with 2% inhaled isoflurane (Baxter, Deerfield, Ill.) in oxygen (Airgas, San Diego, Calif.). Whole skin explants (5 cm×5 cm) were surgically removed from the back of the animals, placed in phosphate buffered saline (PBS) at 4° C., and used within 2 hours following excision. Perfusion of explants and hydroxyproline analysis were carried out essentially as described in Example 3, except that the pig skin explants were perfused with MES buffer pH 5, or MES buffer pH 5 containing 100 μg/ml of cathepsin-L without PH20. Initially, explants were perfused with 6 mL of MES buffer pH 5 for approximately 30 minutes, and fractions were collected every 5-10 minutes. Thereafter, explants were perfused with 3 mL of 100 μg/ml of cathepsin-L in MES buffer pH 5 or buffer alone as a control collected every 5 minutes for approximately 25 minutes. HP analysis showed a time-dependent increase in HP levels in the samples perfused with cathepsin-L. No detectable HP could be measured in samples perfused with MES buffer pH 5 without cathepsin-L. Highest levels of HP were measured at time 15 minutes. HP levels measured at 25 minutes were similar to those measured at 15 minutes.

### Example 5

### Decrease in Fibrous Septae in the Subcutaneous Space by Perfusion of Pig Explants with Activated Cathepsin-L

[0520] Pig skin explants were processed essentially as described in Example 4 by perfusion with MES buffer, pH 5 containing 2500 U/mL rHuPH20, at a rate of 0.17 mL per minute for 30 minutes, followed by perfusion with 3 mL of 100 μg/ml cathepsin-L in MES buffer pH 5 without rHuPH20 at 0.12 mL/min for 25 minutes. Following infusion with cathepsin-L, the explants were trimmed into small pieces that were fixed in 4% buffered formalin overnight. Control untreated pig explants were processed similarly. Tissues were washed in PBS, dehydrated in graded ethanol and xylene solutions, and embedded in paraffin. Blocks were cut in 4 μm thin sections that were transferred to microscope slides and stained with Masson's Trichrome staining for visualization of collagen. Briefly, sections were deparaffinized, hydrated in distilled water and treated with mordant in Bouin's solution (Sigma, Cat #HT10-132) for 15 to 30 minutes at 56° C. The sections were cooled and washed in running water until the yellow color disappeared and rinsed in distilled water. The sections were then stained in Weigert's Iron Hematoxylin Working solution (Sigma Cat # HT107 and HT109) for 5 minutes and washed in running water for 10 minutes. Sections were rinsed in deionized water for 5 minutes and placed in Biebrich Scarlet-Acid Fuchsin (Sigma, Cat # HT151) for 5 minutes. The sections were transferred to Working Phosphotungstic/Phosphomolybdic Acid solution (Sigma Cat # HT152 and HT153) and finally stained in Aniline Blue Solution (Sigma Cat # HT154) for 5 minutes and differentiated in 1% Acetic Acid for 2 minutes. Sections were rinsed in distilled water, dehydrated in 95% alcohol and absolute alcohol, and cleared in xylene with two changes. Sections were mounted and observed in a Nikon inverted microscope. Images were obtained using a 20× objective in a Nikon fluorescent microscope coupled to a camera scanner (Diagnostic Instrument Inc., Sterling Heights, Mich.) containing the SPOT advance imaging program.

[0521] The hypodermis predominantly contains adipose tissue. Dense connective tissue strands made of collagen fibrous septae extend from the dermis deep into the hypodermis and anchor the skin to underlying structures. The histology results shows that fibrous septae separating the fat cell chambers are visible throughout the hypodermis in the non-treated sample. Following treatment with cathepsin-L in MES buffer, pH 5, the number of collagen fibrous septae was substantially lower than in untreated samples, indicating that treatment with cathepsin-L dramatically alters the collagen network organization in the hypodermis.

### Example 6

### A. Collagen Degradation in the Skin of Live Anesthetized Rats

[0522] Perfusion experiments were performed on three month old male Sprague-Dawley rats (Harlan Sprague-Dawley, Inc. Indianapolis, Ind.) kept under 2% isoflurane anesthesia. Perfusion experiments were performed using cathepsin-L at pH 5, and as a control for specificity, in HEPES buffer at pH 7.4. Briefly, using a infusion pump, about 15 mL of a solution containing either 25 mM MES buffer pH 5, or 25 mM HEPES buffer pH 7.4, and 2500 Units/ml of rHuPH20 (Halozyme internal manufacturing lot # 056-100 with specific activity of 124,000 U/mL and protein content of 1.05 mg/mL), were first perfused for approximately 60 minutes via the tail skin using a 27-gauge butterfly needle inserted into the dermal layer of the skin. Thereafter a 3 mL solution containing cathepsin-L or buffer control was perfused for 25 min. Cat-L containing perfusion solutions contained 100 μg/mL of activated Cat-L either at its optimum pH of 5 in 5 mM MES or at the control pH of 7.4 in 20 mM HEPES. The ionic strength of pH 5 buffer was reduced from 25 mM to 5 mM to facilitate neutralization of the pH by the local tissue environment and thereby limit the spread of the active enzyme. In case of Cat-L in HEPES buffer at pH 7.4 an ionic strength of at least 20 mM was maintained to ensure that the added Cat-L, activated and formulated in a high ionic strength buffer at pH 4, would not substantially alter the pH of the HEPES buffer (pH7.4). A small aliquot of the Cat-L added to 20 mM HEPES pH 7.4 was checked with pH paper to ensure that pH of the resulting solution, after Cat-L has been added, was indeed close to pH 7.4. Buffer control solutions used for perfusion were 5 mM MES pH 5 or 20 mM HEPES pH 7.4, with no added enzyme. Perfusate fractions were collected from the tail skin at regular time intervals, i.e at 20, 40 and 60 minutes during the initial perfusion and at 8 and 25 minutes during perfusion with Cat-L. The fractions were pooled in Eppendorf tubes and rapidly frozen to prevent further enzymatic action. Hydroxyproline analysis was performed as described in Example 2. The results show that HP could be measured only in the samples perfused with activated cathepsin-L. The highest levels of HP were measured in the 25 minute perfusate samples. There was no detectable HP in the samples perfused with MES buffer pH 5 only, or with HEPES buffer pH 7.4 only, or with cathepsin-L in HEPES buffer pH 7.4.

### B. Cathepsin-L Treatment Leads to pH-dependent Collagen Degradation In Vitro

[0523] Cathepsins B, D, L and S and bacterial collagenase were assessed for degradation towards rat collagen at pH 5.0 and pH 8.0. Cathepsins B, D, L and S were purchased from R&D systems and each enzyme was activated based on individual specifications from the enzyme manufacture. Bacterial collagenase was purchased from Sigma Chemicals, and does not require activation. Soluble rat tail collagen Type I was digested for 1 hour at 37° C. by incubation with activated cathepsin B, D, L or S or bacterial collagenase, in the manufacture's specified buffers or in Tris pH 8.0 buffered saline, followed by SDS-Page gels and Coomassie Blue staining. Other cathepsins were not tested at pH 5, but at manufacture specified pH and buffer. The results show that cathepsin-L was the only enzyme that was active at pH 5.0, but not at pH 8.0. Cathepsins B, D and S showed some slight degradation of rat collagen at the manufacture specified pH and no degradation of rat collagen at pH 8.0, while bacterial collagenase degraded rat collagen at both pH 5.0 and pH 8.0.

### Example 7

### A. Return to Neutrality Following Acidification of the Skin in a Live Rat

[0524] When a dilute aqueous acid solution is injected into the skin interstitium, the change in pH is temporary and the neutral skin pH is rapidly restored due to the significant buffering capacity of interstitium. Phenol red was used as a visual indicator of interstitial pH. The sodium salt of phenol red is widely used in cell culture medium to identify changes from neutral to acidic pH values. A solution of phenol red has a yellow color at a pH of 6.4 or below, orange color at pH 7.0, red color at pH 7.4 and above, and purple color at pH 7.8.

[0525] Three month old male Sprague-Dawley rats (Harlan Sprague Dawley, Indianapolis, Ind.) were kept under 2% isoflurane anesthesia. Skin was shaven for easy visualization of phenol red dye. 2-2.5 mL of 25 mM MES, pH 5 containing 500 U/ml of rHuPH20 were perfused into the tail skin via a 27-gauge butterfly needle inserted into the dermal layer. This was followed by a solution of 1-1.5 mL of 0.05% phenol red (Sigma-Aldrich, St. Louis, Mo., Cat # P0290) in 10 mM, 25 mM, 50 mM and 100 mM MES buffer, pH 5. MES (2-(N-morpholino-ethanesulfonic acid (C16H13NO4A)) has a molecular weight of 195.2. No rHuPH20 was included in the phenol red solution. Using microcalipers, the phenol red front was measured at different time points, in two dimensions, and the areas were calculated using the formula: Area=(D1×D2)×π/4. The change in color was observed and time to return to neutrality was recorded. The results of Table 4A summarize the average time in minutes to return to neutrality and indicate that return to neutrality can be modulated by the ionic strength of the buffer.

TABLE 4A
Average time to neutrality

| Buffer | | % | % | % | | |
|---|---|---|---|---|---|---|
| strength | Initial | reduc- | reduc- | reduc- | % | Average |
| solution | area of | tion | tion | tion | reduction | time to |
| in mM | Phenol | after 5 | after 10 | after 15 | after 20 | neutrality |
| id MES | Red | minutes | minutes | minutes | minutes | In min |
| 10; n = 3 | 80 | 71 | 86 | 98 | — | 10 |
| 25; n = 3 | 123 | 59 | 78 | 91 | — | 10 |
| 50; n = 2 | 115 | 38 | 100 | 100 | — | 10 |
| 100; n = 2 | 191 | 15 | 38 | 55 | 71 | 20 |

### B. Return to Neutrality Following Acidification of Mouse Skin

[0526] The time period to return to neutralization, and subsequent inactivation of cathepsin-L depends on the strength of the injected buffer. The intrinsic buffering capacity of the interstitium was assessed by measuring the time to return to neutralization using a phenol red indicator dye at pH 5.0 with increasing buffer strength (10-100 mM MES) in nude mice. Anesthetized nude mice were injected with 0.125 mL of MES buffer (10 mM to 100 mM), pH 5 containing phenol red. The time to phenol red neutralization in the dermis was measured visually. The results are depicted in Table 4B below.

TABLE 4B
Measurement of Interstitial Buffering Capacity in Mouse Skin

| | Ionic | | Time to | |
|---|---|---|---|---|
| | Strength | | Neutralization | |
| Buffer | (mM) | pH | (minutes) | SD |
| Phosphate | 10 | 7.4 | 0 | — |
| MES | 10 | 5.0 | 0 | — |
| MES | 25 | 5.0 | 0 | — |
| MES | 50 | 5.0 | 7.3 | 1.25 |
| MES | 100 | 5.0 | 7.8 | 2.1 |

SD: standard deviation

[0527] Thus, by intradermal injection of pH indicators in increasing buffer strengths (10-100 mM MES pH 5.0), it was established that an acidic temporal-spatial extracellular environment from 1-20 minutes/100 mm2 injection could be obtained.

### Example 8

### Engineering of Recombinant Human Liver Cathepsin-L

[0528] Human Cat-L cDNA SEQ ID NO: 9 (encoded by a sequence of nucleotides set forth in SEQ ID NO:10) and Cat-L-His cDNA SEQ ID NO: 12 (encoded by a sequence of nucleotides set forth in SEQ ID NO:13), were PCR amplified from human liver cDNA (Clonetech QUICK-Clone cDNA 637205) using primers that were designed according to the published sequence data for human kidney procathepsin-L cDNA. 5′ NheI and 3′ BamHI restriction sites were added as part of the PCR primer synthesis. The primers used in the amplification are set forth in Table 5.

TABLE 5
Primers

| | | | SEQ | | | Match |
|---|---|---|---|---|---|---|
| | Primer | Sequence | ID NO | Tm | length | length |
| Human | 5′ | 5′-AAGGCCGCTAGCCACCATGGATCC | 16 | 64° C. | 42 mer | 22 |
| Cat-L | | TACACTCATCCTTGCTGC-3′ | | | | |
| | 3′(with | 5′-GAGCACGGATCCTCATCACACAGT | 17 | 65° C. | 35 mer | 20 |
| | two | GGGGTAGCTGG-3′ | | | | |
| | stop | | | | | |
| | codons) | | | | | |
| Cat-L-His | 5′ | 5′-AAGGCCGCTAGCCACCATGGATCC | 16 | 64° C. | 42 mer | 22 |
| | | TACACTCATCCTTGCTGC-3′ | | | | |
| | 3′(with | 5′-CCTGCCGGATCCTCAATGATGATGA | 18 | 57° C. | 49 mer | 16 |
| | 6xHis | TGATGATGCACAGTGGGGTAGCTG-3′ | | | | |
| | tag) | | | | | |

Both cDNA based constructs have the second amino acid of the native Cat-L secretory leader peptide mutated by a single base to form a consensus Kozak sequence, thereby changing the second amino acid from N to D (as set forth in SEQ ID NO: 9 and 12). The identity of the clones was verified by standard agarose gel electrophoresis and DNA sequencing analysis

[0529] The resulting amplified product was introduced for cloning into the HZ24 (b/s) expression vector. The expression vector is a CMV-based bi-cistronic cassette for expression of both the cathepsin-L protein and the murine DHFR gene separated by an internal ribosomal entry site (IRES) from the encephalomyocarditis virus. The resulting sequence of the HZ24-Cat-L expression vector is set forth in SEQ ID NO:11. The resulting sequence of the HZ24-Cat-L-His expression vector is set forth in SEQ ID NO:14.

[0530] Both Cat-L and Cat-L-His expression plasmids were introduced into CHO-S cells (CHO-K1 cells adapted to serum free suspension culture, Invitrogen, Carlsbad, Calif., cat #11619-012) by transfection using Genejuice transfection reagent (EMD Biosciences, San Diego, Calif., cat #70967). The expression plasmids also were introduced into DG44 CHO cells (obtained by license from Dr. Lawrence Chasin, Columbia University), which were adapted to grow in suspension culture in a chemically defined, animal product-free medium (Invitrogen, Cat # 10743-029) by electroporation. For electroporation, greater than 100 μg of ClaI linearized plasmid was used for each electroporation of each of the plasmids. Twenty million DG44 CHO cells per electroporation, at 350 Volts constant voltage were transfected. The electroporation buffer contained 2× HeBS (40 mM HEPES, pH 7.0; 274 mM NaCl; 10 mM KCl; 1.4 mM Na2HPO4; 12 mM dextrose). Transfected cells were cloned by limiting dilution 72 hours after electroporation in standard CD-CHO media (Invitrogen #12610-010) without sodium hypoxanthine and thymidine to select for cells carrying the DHFR plasmid. Selected clones growing without sodium hypoxanthine and thymidine were further sub-cloned, with amplification using methotrexate to increase insert copy number. A mock transfection served as a negative control.

[0531] Supernatants were harvested 72 hours post transfection and spun at 1500 rpm for 5 minutes. Cell free supernatants from CHO-S and CHO-DG44 cells transfected with his-Cat-L, Cat-L and mock were applied to 10 kDa cutoff micron centrifugal concentrators (Millipore; Bedford, Mass. Cat# 42407) and concentrated approximately 10-fold by centrifugation at 12000 rpm at 4° C. Recombinant Human Cathepsin-L secreted into tissue culture supernatants was screened by capture ELISA (Calbiochem Cathepsin-L ELISA Kit #QIA94), Western Blot analysis using the monoclonal Mab 33/1 (Bender MedSystems, Burlingame, Calif.) as described in Example 10 and for enzymatic activity using the fluorescent peptide substrate (Z-L-R-AMC) as described in Example 9.

### Example 9

### Determination of Enzymatic Activity of cathepsin-L using a Fluorogenic Peptide Substrate

[0532] Enzymatic activity of cathepsin-L was assayed using a commercially available fluorogenic substrate, designated as Z-Leu-Arg-AMC (Z=:N-carbobenzyloxy; AMC: 7-Amino-4-Methyl Coumarin, R&D Systems, Minneapolis, Minn., Cat# ES008). The peptide substrate contains a highly fluorescent 7-amino-4-methyl coumarin group (AMC) that is quenched by the amide bond formed between its amino group and the carboxyl group of the Arg residue. Activated cathepsin-L cleaves this amide bond resulting in an increase in released fluorescence. While the peptide substrate can be cleaved by other cathepsins, prominent among which is cathepsin-B, cathepsin-L activity was specifically determined by using suitable specific inhibitors for the cathepsin-B and measuring activity in the presence and absence of the inhibitor. Specifically the selective cathepsin-B inhibitor CA-074 (Calbiochem, San Diego, Calif., Cat# 205530) was used at a final concentration of 1 μM and samples were assayed in presence and absence of CA-074. Cell culture supernatants from 72 hours post transfection in CHO cells were adjusted to pH 5 by adding concentrated MES buffer at pH 5 and incubated on ice for 30 minutes. This acid activation step cleaves the pro-peptide and generates mature cathepsin-L. To dilute the propeptide fragment which is a potent inhibitor of cathepsin-L enzyme activity (Carmona, E. et al. Potency and selectivity of the cathepsin-L propeptide as an inhibitor of cysteine proteases. Biochemistry 35: 8149-8157 (1996)), the samples were concentrated and buffer exchanged with 50 mM MES pH5 buffer on a 30 KDa microcon tube three times. Samples were then assayed for enzyme activity by the fluorogenic peptide substrate assay on the Z-AMC substrate,

[0533] A commercial preparation of cathepsin-L (R&D Systems; Cat# 952-CY) was activated in a manner similar to that of the samples, and was used as a standard by serial dilution. Following activation, samples and standards were serially diluted in 100 mM MES buffer pH 5 containing 5 mM DTT and 10 mM EDTA, in an opaque bottom microplate and incubated with the fluorogenic peptide substrate Z-AMC at 37° C. for 30 minutes. Z-AMC substrate was used at a final concentration of 10 μM in a total volume of 200 μL when combined with samples or standards.

[0534] The resulting fluorescence was read at the recommended optimum excitation-emission (380 nm-460 nm) band for the substrate in a fluorescent plate reader (Molecular Devices, SpectraMax 3, Sunnyvale, Calif.). Sample values were derived from the standard curve drawn from the relative fluorescence unit (RFU) values obtained from the dilution series of the standard. After a 4-parameter fit with the Softmax® software (Molecular Devices, SpectraMax 3, Sunnyvale, Calif.), the standard curve was pseudo-linear between the concentration ranges of 10-100 ng/mL. The results are shown in Table 6 below. The activity of cathepsin-L from CHO-S transfected cells was at least 10-20 fold higher than background activity from mock transfected host cells and by assaying in presence of the selective cathepsin-B inhibitor CA-074. The increased enzymatic activity in cathepsin-L transfected tissue culture medium can thus be assigned to Cat-L specific activity.

TABLE 6
Cat-L enzyme activity measurements in presence of cathepsin-
B inhibitor by Z-AMC assay in transfected cells 72 hours post
transfection

| | Clone description | | |
|---|---|---|---|
| | Mock | Cat-L | His Cat-L |
| | transfected | transfected | transfected |
| | CHO—S | CHO—S | CHO—S |
| ng/mL of Cat-L | 20 | 723 | 248 |
| activity | | | |

### Example 10

### Western Blot Analysis of Expressed Human Recombinant Cathepsin-L

[0535] Following expression and concentration of cell free supernatants as described in Example 8, Western Blot analysis was performed to confirm expression. Briefly, for each of the 6 different samples (cat-L, cat-L-His and mock from each of CHO-S or CHO-DG44 cells), 30 μL of concentrated supernatants were mixed with 10 μL of 4× (instead of gel loading sample buffer) for SDS-PAGE (EMD Bioscience, San Diego, Calif., cat# 70607-3) and 2 μL of 100 mM DTT and incubated at 80° C. for 20 minutes. As a positive control, 750 ng of commercial purified recombinant cathepsin-L (R&D Systems) in 30 μL of 1×PBS was included and processed identically. The total volume (42 μL) of samples were loaded onto 4-20% Tris-Glycine gels (Invitrogen, Carlsbad, Calif., Cat# EC6028BOX) and electrophoresis was carried out in Tris-Glycine SDS running buffer until the dye front of the prestained molecular weight marker (Invitrogen, Cat# LC5925) reached the bottom of the gel. The proteins were transferred onto PVDF membrane by the I-Blot semi dry blotting apparatus (Invitrogen, Cat# IB1001) according to manufacturer's instructions. Transfer was verified by the almost complete absence of color of the prestained marker bands on the gel. The membrane was blocked in blocker buffer consisting of 5% non fat dry milk in PBS for 2 hours at room temperature. Cathepsin-L was detected with a mouse monoclonal antibody (Mab 33/1) to human cathepsin-L (Bender MedSystems, Burlingame, Calif., Cat# BMS166) used at 1 μg/mL final concentration in blocker and incubated overnight at 4° C. followed by a HRP conjugated goat anti-mouse IgG (Calbiochem, San Diego, Calif., Cat# DC02L) used at a concentration of 33 ng/mL in blocker for 1 hr at room temperature. The HRP signal was developed by the TMB Insoluble (Calbiochem, Cat# 613548) membrane development solution and the reaction was stopped after 30 minutes at room temperature.

[0536] Western blot analysis showed protein bands specific for Cat-L. No specific band was detected in the mock transfected cells. The expression level of Cat-L and His-Cat-L appeared to be higher in CHO-S cells than in DG44 cells, probably due to transfection efficiency in the two cell lines. The Western blot analysis results were consistent with results using enzyme activity assay with the fluorogenic peptide substrate Z-AMC as described in Example 9. The molecular weight of cathepsin-L expressed in CHO-S and DG44 is 44-45 KDa which corresponds to the expected size of the protein still containing the propeptide. The molecular weight of commercial cathepsin used as a positive control (R&D Systems) was 36 KDa for mature cathepsin-L. The difference in size between the protein expressed in transfected CHO-S and CHO-DG44 cells and the commercial cathepsin-L may be due to different host cell specific glycosylation or to the removal of the propeptide from the commercial Cat-L.

### Example 11

### A. Generation of Synthetic Cathepsin-L and Cathepsin-L-His

[0537] A DNA construct encoding mature human cathepsin-L, (amino acids 18-333 of GenBank Accession No. EAW62736; SEQ ID NO:1) was synthesized using codon optimization for CHO cells. Codon optimization was based on codon optimization table for Cricetulus griseus, listed by Blue Heron Biotech (blueheronbio.com). The construct was synthesized to contain a heterologous signal peptide designed from the human kappa IgG gene family (SEQ ID NO:2) to permit secretion of the recombinant protein into tissue culture supernatant. The nucleotide sequence of the optimized cathepsin-L construct is set forth in SEQ ID NO: 3 and encodes a polypeptide set forth in SEQ ID NO:4. A 5′ Nhe I restriction site and a 3′ BamH I restriction site were incorporated as part of the construct synthesis. The synthetic construct was then introduced into the HZ24 (b/s) expression vector, as described in Example 8. The synthetic Cat-L expression vector was designated HZ24 (B/S)-CAT-L and is set forth in SEQ ID NO:5. Another Cat-L construct containing a C-terminal 6 Histidine tag separated by a linker (GGGGSG; SEQ ID NO:15) also was synthesized. The nucleotide sequence of the synthesized Cat-L-His construct is set forth in SEQ ID NO:6 and encodes a polypeptide set forth in SEQ ID NO:7. This construct also contained a 5′ Nhe I and a 3′ BamH I restriction site, incorporated as part of the construct synthesis, and was introduced into the HZ24 (b/s) expression vector. The synthetic Cat-L-His expression vector was designated HZ24 (B/S)-CAT-L-His and is set forth in SEQ ID NO: 8.

[0538] The synthetic Cat-L expression vector set forth in SEQ ID NO:5 and the synthetic Cat-L-His expression vector set forth in SEQ ID NO:8 were transfected into CHO-DG44 cells by electroporation, as described in Example 8. Supernatants were harvested for 72 hours post-transfection and were processed as described in Example 8 (without pH adjustment) to generate non-activated cathepsin-L.

[0539] Tissue culture supernatants also were processed to result in the activation of cathepsin-L. This was achieved using a low pH, resulting in cleavage of the pro-peptide of cathepsin-L, resulting in the activation of the enzyme. Supernatants from cells transfected with the synthetic construct and un-transfected control cells were adjusted to pH 4 by adding concentrated acidic buffer (1000 mM Formate pH 4, 1000 mM NaCl, 50 mM DTT, 100 mM EDTA) to the supernatants in a ratio of 1:10, respectively. The supernatants were incubated on ice for 30 minutes to allow for complete activation. They were then concentrated by centrifuging through a 30 KDa molecular weight cutoff centrifugal concentration device (Microcon 30, Millipore, Bedford, Mass. Cat# 42410), which allowed the cleaved propeptide (with a predicted size of approximately 12-14 KDa) to pass through, while retaining the mature protein (predicted size about 36-40 kDa). Following concentration, activated and non-activated supernatants were run on a 4-12% SDS-PAGE gel followed by analysis by Western Blot using the monoclonal Mab 33/1 as described in Example 10. Synthetic Cathepsin-L and Cat-L-His were detected in tissue culture supernatants of transfected cells at similar levels. The molecule weight of the Cathepsin-L and Cat-L-His in non-activated supernatants was about 44 kDa, compared to about 36 to 40 kDa for the activated supernatants, due to the absence of the pro-peptide.

[0540] Activated supernatants also were screened for Cathepsin-L enzymatic activity using the fluorescent peptide substrate (Z-L-R-AMC) as described in Example 9. Cat-L enzyme activity was measured in the presence of the cathepsin-B inhibitor (to block host cathepsin-B-like enzyme activity) by Z-AMC assay in transfected CHO-DG44 cells 72 hours post transfection. The results are set forth in Table 7 below. The activity of cathepsin-L from CHO-DG44 transfected cells 72 hours post transfection was about 6-17 fold higher than background activity from mock transfected host cells. By assaying in the presence of the selective cathepsin-B inhibitor CA-074, the contribution from host cathepsin-B like enzyme activity was blocked. Thus, the increased enzymatic activity in cathepsin-L transfected tissue culture medium can be assigned to Cat-L specific activity expressed from the transfected Cat-L clones.

TABLE 7

| | Clone description | | |
|---|---|---|---|
| | Mock | Cat-L | His Cat-L |
| | transfected | transfected | transfected |
| ng/mL of Cat-L | Less than 100 | 1700 | 600 |
| activity | | | |

### B. Selection of Synthetic Cathepsin-L Clones in Methotrexate

[0541] The synthetic Cathepsin-L cells, produced as described in section A, above, were cloned by limiting dilution after electroporation in standard CD-CHO media without sodium hypoxanthine and thymidine to select for cells carrying a plasmid with the DHFR gene, then further sub-cloned and expanded in the presence of 50 mM methotrexate to increase insert copy number. Subsequent rounds of sub-cloning and expansion in 200 mM and 1000 mM were then performed to identify methotrexate-amplified cells lines suitable for use in large scale production of cathepsin L.

[0542] 1. Cloning and Identification of Cat-L Cell Clones in No Methotrexate

[0543] To select cells and identify Cat-L cell clones that grew in the absence of methotrexate, cells from the transfection described above were collected and washed twice with standard CD-CHO media (GIBCO; Invitrogen) containing 4 mM GlutaMAX™-I (GIBCO; Invitrogen), and without hypoxanthine and thymidine supplements, by brief centrifugation at 500×g. After the final wash, cell were counted, and diluted to 10,000 to 20,000 viable cells per mL. A 0.1 mL aliquot of the cell suspension was transferred to each well of ten, 96 well round bottom tissue culture plates. All plates were supplemented with an additional 0.1 mL of the same. Cells were allowed to grow at 37° C., 5% CO₂ in a humidified incubator.

[0544] Wells containing growing colonies of cells under selection without hypoxanthine and thymidine were identified by a combination of Cathepsin-L enzyme assay and visual appearance of cell growth in culture wells. Enzyme activity in the tissue culture supernatant of each well was assessed as described in Example 9. Twenty clones were identified (Table 7a).

TABLE 7a

| Clone | Relative |
|---|---|
| (Plate/well) | Cat-L activity |
| ID | (rfu) |
| 1C5 | 8957 |
| 1F6 | 9161 |
| 2F2 | 8722 |
| 2C8 | 8487 |
| 3E4 | 4952 |
| 3F8 | 8599 |
| 4F4 | 9540 |
| 4D10 | 3374 |
| 5B2 | 10065 |
| 5B10 | 11709 |
| 6E3 | 9393 |
| 6G11 | 5214 |
| 7B2 | 6792 |
| 7G9 | 9619 |
| 8E4 | 3124 |
| 8D7 | 3085 |
| 9A5 | 6226 |
| 9E12 | 7653 |
| 10D3 | 2053 |
| 10F6 | 3895 |

[0545] The identified clones were expanded into individual wells of 24-well tissue culture plates, containing 1 mL of CD-CHO media supplemented with 4 mM GlutaMAX™-I, and without hypoxanthine and thymidine. The cells were grown at 37° C., 5% CO₂ in a humidified incubator. The cells were further expanded into T-75 tissue culture flasks in the same media. Three vials of each clone were archived by freezing in 10% DMSO, 45% conditioned media.

[0546] 2. Cloning and Identification of Cells in 50 nM Methotrexate

[0547] The 20 cell line sub-clones demonstrating proliferation and expression of Cat-L enzymatic activity were sub-cloned from 24 well plates into 96-well round bottom tissue culture plates, using a two-dimensional infinite dilution strategy, in which the cells are diluted 1 in 3 across the plate, and 1 in 2 down the plate. Diluted sub-clones were grown in a background of 500 non-transfected DG44 CHO cells per well, to provide necessary growth factors for the initial days in culture. Five plates were made per sub-clone, containing a final concentration of 50 nM methotrexate in CD-CHO media supplemented with 4 mM GlutaMAX™-I, and without hypoxanthine and thymidine. Cells were grown at 37° C., 5% CO₂ in a humidified incubator.

[0548] The sub-clones growing in 50 nM methotrexate that expressed recombinant human (synthetic) Cat-L were identified by measuring Cat-L enzyme activity as described in Example 9. Wells demonstrating substantially higher enzymatic activity were compared to the neighboring wells microscopically, and high expressing outlier clones were chosen for expansion. A total of 96 individual clones were expanded into 12-well tissue culture plates containing a final concentration of 50 nM methotrexate in CD-CHO media supplemented with 4 mM GlutaMAX™-I, and without hypoxanthine and thymidine. The cells were grown at 37-C, 5% CO₂ in a humidified incubator.

[0549] These 96 sub-clones were tested for secreted Cat-L enzymatic activity as described in Example 9 at two different times points, 7 days apart. The sub-clones demonstrating the greatest increases in Cat-L enzymatic activity over the 7 day period and healthy microscopic appearance were chosen for propagation. The 7 sub-clones that were propagated included 9E12 (#16), 7G9 (#50), 1C5 (#69), 4F4 (#76), 1F6 (#77), 5B10 (#90) and 2F2 (#92). These sub-clones were expanded in the presence of 50 nM methotrexate into T-25 and T-75 flasks and archived by freezing.

[0550] 3. Cloning and Identification of Cells in 200 nM Methotrexate

[0551] Sub-clones 9E12 (#16), 7G9 (#50), 1C5 (#69), 4F4 (#76), 1F6 (#77), 5B10 (#90) and 2F2 (#92) were then sub-cloned into media containing 200 nM methotrexate. Five, 96-well round bottom tissue culture plates were set-up using the two-dimensional infinite dilution strategy for each of the seven sub-clones. Diluted sub-clones were grown in a background of 500 non-transfected DG44 CHO cells per well in CD-CHO media supplemented with 200 nM methotrexate and 4 mM GlutaMAX™-I (without hypoxanthine and thymidine). The 35 plates were incubated at 37° C., 5% CO₂ in a humidified incubator.

[0552] The sub-clones expressing high levels of rHuCat-L while being grown in 200 nM methotrexate were identified by measuring Cat-L enzyme activity in the cell culture supernatant, as described in Example 9. A total of 35 sub-clones (5 from each of 9E12 (#16), 7G9 (#50), 1C5 (#69), 4F4 (#76), 1F6 (#77), 5B10 (#90) and 2F2 (#92) were selected and expanded into 24-well tissue culture plates in CD-CHO media supplemented with 200 nM methotrexate and 4 mM GlutaMAX™-I (without hypoxanthine and thymidine). The sub-clones were incubated at 37° C., 5% CO₂ in a humidified incubator.

[0553] The 35 sub-clones were assayed for Cat-L activity, and the 10 sub-clones expressing the highest levels of secreted enzymatic activity were propagated to 6-well tissue culture plates. The 10 clones, and the clones from which they were derived in Table 7b. These 10 sub-clones were subsequently expanded into T75 tissue culture flasks and then into shaker flasks in CD-CHO media supplemented with 200 nM methotrexate and 4 mM GlutaMAX™-I (without hypoxanthine and thymidine). Shaker flasks growing the subclones were expanded, and cells archived by freezing.

[0554] Four sub-clones, 9E12-3D3 and 7G9-2F2, 7G9-3F1 and 7G9-5F2, demonstrating early rapid cell expansion (shorter doubling times) in small shaker flasks for greater than 7 passages were expanded for inoculation of 4×10 L controlled Bioreactors for comparative expression and production studies. The four sub-clones also were continuously expanded and passaged in 1 L shaker flasks containing CD-CHO media supplemented with 200 nM methotrexate and 4 mM GlutaMAX™-I. Cell density and viability were measured every other day, with cell-free retains stored at 4C for later evaluation of enzyme activity.

TABLE 7b

| | 50 nM | 200 nM |
|---|---|---|
| Primary | methotrexate | methotrexate |
| Clone | sub-clones | sub-clones |
| 1C5 | 1C5-3 | 3-2F2 |
| 1C5 | 1C5-3 | 3-1F2 |
| 2F2 | 2F2-7 | 7-5F3 |
| 4F4 | 4F4-4 | 4-3C3 |
| 4F4 | 4F4-4 | 4-4B3 |
| 7G9 | 7G9-2 | 2-2F2 |
| 7G9 | 7G9-2 | 2-3F1 |
| 7G9 | 7G9-2 | 2-5F2 |
| 9E12 | 9E12-1 | 1-3D3 |
| 9E12 | 9E12-1 | 1-1C2 |

[0555] 4. Cloning and Identification of Cells in 1000 nM Methotrexate

[0556] The 9E12-1-3D3 and 1C5-3-2F2 were sub-cloned for a third time into 1000 nM methotrexate containing media on Jul. 1, 2008. Five, 96-well round bottom tissue culture plates were set-up using the two-dimensional infinite dilution strategy for each of the two sub-clones. The diluted sub-clones were grown in a background of 500 non-transfected DG44 CHO cells per well at 37° C., 5% CO₂ in a humidified incubator, CD-CHO media containing 1000 nM methotrexate and 4 mM GlutaMAX™-I (without hypoxanthine and thymidine).

[0557] Wells containing sub-clones growing in 1000 nM methotrexate were identified by visual and microscopic examination. Twenty wells containing growing cells diluted from the 9E12-1-3D3 and 1C5-3-2F2 sub-clones (10 wells per subclone) were then assayed for rHuCat-L expression by Western Blot. All 20 sub-clones were expanded to 12-well tissue culture plates in CD-CHO media containing 1000 nM methotrexate and 4 mM GlutaMAX™-I (without hypoxanthine and thymidine) and incubated at 37° C., 5% CO₂ in a humidified incubator. Table 7c sets forth the 20 sub-clones, and the sub-clones from which they were derived. The clones able to grow in 1000 nM methotrexate are then expanded and assayed for Cat-L enzymatic activity, and archived by freezing in liquid nitrogen.

TABLE 7c

| | 50 nM | 200 nM | 1000 nM |
|---|---|---|---|
| | methotrexate sub- | methotrexate sub- | methotrexate sub- |
| Primary Clone | clones | clones | clones |
| 9E12 | 9E12-1 | 1-3D3 | 1F5 |
| 9E12 | 9E12-1 | 1-3D3 | 1E2 |
| 9E12 | 9E12-1 | 1-3D3 | 2D4 |
| 9E12 | 9E12-1 | 1-3D3 | 2G8 |
| 9E12 | 9E12-1 | 1-3D3 | 3E3 |
| 9E12 | 9E12-1 | 1-3D3 | 3G2 |
| 9E12 | 9E12-1 | 1-3D3 | 4D4 |
| 9E12 | 9E12-1 | 1-3D3 | 4F3 |
| 9E12 | 9E12-1 | 1-3D3 | 5D2 |
| 9E12 | 9E12-1 | 1-3D3 | 5F2 |
| 1C5 | 1C5-3 | 3-2F5 | 1D4 |
| 1C5 | 1C5-3 | 3-2F5 | 1G2 |
| 1C5 | 1C5-3 | 3-2F5 | 2E2 |
| 1C5 | 1C5-3 | 3-2F5 | 2E3 |
| 1C5 | 1C5-3 | 3-2F5 | 3D6 |
| 1C5 | 1C5-3 | 3-2F5 | 3G3 |
| 1C5 | 1C5-3 | 3-2F5 | 4E4 |
| 1C5 | 1C5-3 | 3-2F5 | 4G2 |
| 1C5 | 1C5-3 | 3-2F5 | 5F4 |
| 1C5 | 1C5-3 | 3-2F5 | 5G5 |

### B. Large Scale Production and Purification of Cathepsin L

[0558] To purify the synthetic Cathepsin-L in large quantities, unactivated pro-Cathepsin L cell culture supernatant from the cell line 9E12-1-3D3, produced as described above, was cultured in a 36 L bioreactor. Following incubation in the bioreactor, the cell culture was clarified by harvest filters, concentrated and buffer-exchanged using tangential flow filtration, viral-inactivated by solvent/detergent, and then purified by sequential chromatography on Q Sepharose Fast Flow (GE Healthcare) anion exchange chromatography and Ceramic Hydroxyapatite chromatography (Biorad, Richmond, Calif.). Following treatment at reduced pH (pH 4.5), activated Cathepsin-L was further purified by SP Sepharose Fast Flow (GE Healthcare) cation exchange chromatography, viral filtration and tangential flow filtration.

[0559] The 9E12-1-3D3 cell line was first expanded through a series of flasks. Briefly, 35 mL of culture at passage 6, with 6×10⁵ cell/mL and a viability of 73% was expanded to 200 mL with CD CHO media (Invitrogen) supplemented with 40 mL/L GlutaMAX™-I (Invitrogen; stock solution 200 mM) and 200 nM methotrexate. At four days, it was expanded to 1200 mL in a 6 L sparged spinner using CD CHO media supplemented with 40 mL/L GlutaMAX™-I. In the 6 L spinner, the culture was then expanded to 2200 mL on day 11, to 3500 mL on day 15, and finally to 5000 mL on day 18, each time using CD CHO media supplemented with 40 mL/L GlutaMAX™-I.

[0560] The 36 L bioreactor, containing 20 L CD CHO medium supplemented with 800 mL GlutaMAX™-1,100 mg of recombinant human insulin (rHuInsulin), and 30 mL Gentamicin, was inoculated with an initial seeding density of 4.6×10⁵ cells/mL. To provide smooth mixing and a slight vortex in the culture, the agitation set point was 80 RPM, the temperature setpoint was 37° C., the pH setpoint was pH 7.15, and the dissolved oxygen setpoint was 25%. The bioreactor vessel received filtered air overlay and an air/oxygen/CO₂ sparge, as controlled by an Applikon ADI 1030 controller. A constant air sparge of 0.1-0.2 slpm was provided, with the O₂ solenoid valve as a slave to the DO controller, such that the O₂ flow automatically supplemented the constant air sparge as needed.

[0561] During the bioreactor run, the culture was supplemented with feed media at various intervals to supplement nutrients and glucose throughout the bioreactor run, as well as providing additional basal medium concentrate and GlutaMAX™-I in the early, growth phase of the cells, in order to maximize the growth rate and peak cell density. Additional protein digest (Yeastolate Utlrafiltrate 50× (200 g/L); Invitrogen) and sodium butyrate were added in the late, production phase of the bioreactor run maximize expression and secretion of product. The feed media was sterile filtered into the bioreactor via peristaltic pump. On days 7, 10, 12, 13, 14 and 16, 500 mL of Feed #1-6, respectively, were added to the bioreactor cell cure. Feed #1 and Feed #2 contained 48.6 g/L powdered CD CHO AG™ media, 200 mL/L GlutaMAX™-I (final concentration 8 mM), 200 mL/L Yeastolate Utlrafiltrate 50× (final concentration 8 g/L), 50 g D-Glucose (Dextrose; Invitrogen), and 1.1 g sodium butyrate. Feed #3 through Feed #6 contained 48.6 g/L powdered CD CHO AG™ media, 100 mL/L GlutaMAX™-I (final concentration 4 mM), 300 mL/L Yeastolate Utlrafiltrate 50× (final concentration 12 g/L), 40 g D-Glucose (Dextrose; Invitrogen), and 1.6 g sodium butyrate. The cell culture was sampled before each feeding and prior to harvest (day 19) to test for viable cell density (VCD) and % viability by hemocytometer with Trypan Blue staining, and residual glucose. Table 8 sets forth the results of the testing.

TABLE 7d

| | | | Cell | | |
|---|---|---|---|---|---|
| Hours post | VCD × | % | culture | | |
| inoculation | 10⁵ cells/mL | viability | volume (L) | Glucose | Feed |
| 0 | 4.6 | 87 | 26 | 8280 | |
| 72 | 16.3 | 93 | 26 | 4690 | |
| 115 | 37.6 | 93 | 26 | 4230 | |
| 165 | 43.1 | 83 | 26 | 1830 | Feed #1 |
| 234 | 45.7 | 78 | 26.5 | 1040 | Feed #2 |
| 264 | 49.7 | 78 | 27 | 1320 | |
| 287 | 42.2 | 78 | 27 | 800 | Feed #3 |
| 312 | 39.8 | 74 | 27.5 | 1180 | Feed #4 |
| 336 | 39.1 | 73 | 27.5 | 1390 | Feed #5 |
| 386 | 28.3 | 58 | 28 | 1360 | Feed #6 |
| 409 | 24.5 | 50 | 28.5 | 1810 | |
| 432 | 20.5 | 36 | 28.5 | 1530 | |
| 448 | 18.9 | 31 | 28.5 | 1190 | Harvest |

[0562] The bioreactor was harvested on day 19, and the cell culture (approximately 28.5 L) was clarified by filtration to remove cells and cell debris. The cell removal and clarification filtration consisted of Millipore Pod filters DOHC (0.5 m²) and A1HC (0.1 m²). The Millipore Pods were first flushed with water for injection (WFI) followed by equilibration with PBS, before the harvest was added. Following clarification, the harvested cell culture fluid (HCCF) was filtered into storage bags via small capsule filters (Sartobran 300, 0.45 μm, Sartorius). The HCCF (31.6 L, consisting of 28.5 L of culture supernatant and 3.1 L of PBS flush volume) was supplemented to yield 50 mM Tris and stored at 2-8° C.

[0563] The HCCF was then concentrated and diafiltered by tangential flow filtration (TFF), consisting of 5×1 ft² of PES membrane with a 30 kDa molecular weight cut-off. The membrane was first equilibrated in 20 mM Bis-Tris, 50 mM NaCl, pH 7.0. The 31.6 L HCCF was added to the TFF system concentrated 10× to 3 L, then dialfiltered with 28 L of 20 mM Bis-Tris, 50 mM NaCl, pH 7.0. The concentrated HCCF was filtered through a 0.2 μm filter, yielding a final volume of 3 L. Viral inactivation was effected by treating the concentrated/buffer exchanged harvest with 1% Triton X-100 and 0.3% tri-n-butyl phosphate for 90 minutes at room temperature.

[0564] A Q Sepharose Fast Flow (GE Healthcare) anion exchange column was prepared. Post sanitization, charging, and neutralization, the column was equilibrated with five column volumes of 20 mM Bis-Tris, pH 7.0. Following viral inactivation, the concentrated, buffer exchanged harvest was loaded onto the Q column using a five minute residence time for all steps (407 cm/hr). The column was sequentially washed with five column volumes of 20 mM Bis-Tris, pH 7.0 and five column volumes of 20 mM Bis-Tris, 50 mM NaCl, pH 7.0. The protein was eluted with 20 mM Bis-Tris, 160 mM NaCl, pH 7.0.

[0565] A ceramic hydroxyapatite (CHT) column (BioRad) was equilibrated with 5 mM sodium phosphate, pH 7.0 post sanitization, charging, and neutralization. The Q Sepharose purified protein was loaded onto the CHT column using a five minute residence time for all steps (257 cm/hr). The column was sequentially washed with five column volumes of 5 mM sodium phosphate, pH 7.0 and five column volumes 10 mM sodium phosphate, pH 7.0. The protein was eluted with 70 mM sodium phosphate, pH 7.0.

[0566] Pro-cathepsin L was then activated to Cathepsin L by adjusting the pH to 4.5 with 0.5 M sodium acetate, pH 4.0. Following activation, the Cathepsin L was further purified by SP Sepharose Fast Flow chromatography. A SP Sepharose Fast Flow (GE Healthcare) ion exchange column was prepared and equilibrated with five column volumes of 50 mM sodium acetate, pH 4.5 post sanitization, charging, and neutralization. Prior to loading, the activated Cathepsin L was diluted two-fold with 50 mM sodium acetate, pH 4.5. The activated Cathepsin L was loaded onto the SPFF column using a five minute residence time for all steps (253 cm/hr). The column was washed with five column volumes of 50 mM sodium acetate, pH 4.5. The protein was eluted with 50 mM sodium acetate, 50 mM NaCl, pH 5.0. The purified protein is then filtered to remove viruses, and concentrated, such as to between 1-20 mg/mL.

### Example 12

### Generation of a Soluble Recombinant Human pH20 (rHuPH20) Expressing Cell Line

[0567] The HZ24 plasmid (set forth in SEQ ID NO:224) was used to transfect Chinese Hamster Ovary (CHO cells). The DNA encoding the soluble rHuPH20 construct contains an NheI site and a Kozak consensus sequence prior to the DNA encoding the methionine at amino acid position 1 of the native signal leader of human PH20 hyaluronidase, and a stop codon following the DNA encoding the tyrosine at amino acid position 482 of human PH20 hyaluronidase, followed by a BamHI restriction site. The construct pCI-PH20-IRES-DHFR-SV40pa (HZ-24), therefore, results in a single mRNA species driven by the CMV promoter that encodes amino acids 1-482 of PH20 (set forth in SEQ ID NO:225) and amino acids 1-187 of the dihydrofolate reductase (set forth in SEQ ID NO:261), separated by an internal ribosomal entry site (IRES).

[0568] Non-transfected DG44 CHO cells were grown in GIBCO Modified CD-CHO media for DHFR(−) cells, supplemented with 4 mM Glutamax™ and 18 ml Plurionic F68/L (Gibco), and were seeded at 0.5×10⁶ cells/ml in a shaker flask in preparation for transfection. Cells were grown at 37° C. in 5% CO₂ in a humidified incubator, shaking at 120 rpm. Exponentially growing non-transfected DG44 CHO cells were tested for viability prior to transfection.

[0569] Sixty million viable cells of the non-transfected DG44 CHO cell culture were pelleted and resuspended to a density of 2×10⁷ cells in 0.7 mL of 2× transfection buffer (2× HeBS: 40 mM Hepes, pH 7.0, 274 mM NaCl, 10 mM KCl, 1.4 mM Na₂HPO₄, 12 mM dextrose). To each aliquot of resuspended cells, 0.09 mL (250 μg) of the linear HZ24 plasmid (linearized by overnight digestion with Cla I (New England Biolabs); linear HZ24 plasmid set forth in SEQ ID NO: 19) was added, and the cell/DNA solutions were transferred into 0.4 cm gap BTX (Gentronics) electroporation cuvettes at room temperature. A negative control electroporation was performed with no plasmid DNA mixed with the cells. The cell/plasmid mixes were electroporated with a capacitor discharge of 330 V and 960 μF or at 350 V and 960 μF.

[0570] The cells were removed from the cuvettes after electroporation and transferred into 5 mL of Modified CD-CHO media for DHFR(−) cells, supplemented with 4 mM Glutamine and 18 ml Plurionic F68/L (Gibco), and allowed to grow in a well of a 6-well tissue culture plate without selection for 2 days at 37° C. in 5% CO₂ in a humidified incubator.

[0571] Two days post-electroporation, 0.5 mL of tissue culture media was removed from each well and tested for the presence of hyaluronidase activity (see Example 16). The results are set forth in Table 8 below.

TABLE 8
Initial Hyaluronidase Activity of
HZ24 Transfected DG44 CHO cells at 40
hours post-transfection

| | | Activity |
|---|---|---|
| | Dilution | Units/ml |
| Transfection 1 | 1 to 10 | 0.25 |
| 330 V | | |
| Transfection 2 | 1 to 10 | 0.52 |
| 350 V | | |
| Negative | 1 to 10 | 0.015 |
| Control | | |

[0572] Cells from Transfection 2 (350V) were collected from the tissue culture well, counted and diluted to 1×10⁴ to 2×10⁴ viable cells per mL. A 0.1 mL aliquot of the cell suspension was transferred to each well of five, 96 well round bottom tissue culture plates. One hundred microliters of CD-CHO media (GIBCO) containing 4 mM GlutaMAX™-1 supplement (GIBCO™, Invitrogen Corporation) and without hypoxanthine and thymidine supplements were added to the wells containing cells (final volume 0.2 mL).

[0573] Ten clones were identified from the 5 plates grown without methotrexate (see Table 9).

TABLE 9

| Plate/ | Relative |
|---|---|
| Well ID | Hyaluronidase |
| 1C3 | 261 |
| 2C2 | 261 |
| 3D3 | 261 |
| 3E5 | 243 |
| 3C6 | 174 |
| 2G8 | 103 |
| 1B9 | 304 |
| 2D9 | 273 |
| 4D10 | 302 |

[0574] Six HZ24 clones were expanded in culture and transferred into shaker flasks as single cell suspensions. Clones 3D3, 3E5, 2G8, 2D9, 1E11, and 4D10 were plated into 96-well round bottom tissue culture plates using a two-dimensional infinite dilution strategy in which cells were diluted 1:2 down the plate, and 1:3 across the plate, starting at 5000 cells in the top left hand well. Diluted clones were grown in a background of 500 non-transfected DG44 CHO cells per well, to provide necessary growth factors for the initial days in culture. Ten plates were made per subclone, with 5 plates containing 50 nM methotrexate and 5 plates without methotrexate.

[0575] Clone 3D3 produced 24 visual subclones (13 from the no methotrexate treatment, and 11 from the 50 nM methotrexate treatment.) Significant hyaluronidase activity was measured in the supernatants from 8 of the 24 subclones (>50 Units/mL), and these 8 subclones were expanded into T-25 tissue culture flasks in the presence of 50 nM methotrexate where appropriate. Clone 3D3 50 nM was further expanded in 500 nM methotrexate giving rise to clones producing in excess of 1,000 Units/ml in shaker flasks (clone 3D35M; generation 1 or Gen1 3D35M).

### Example 13

### Production and Purification of Gen1 Human sPH20

### A. 5 L Bioreactor Process

[0576] A vial of 3D35M was thawed and expanded from shaker flasks through 1 L spinner flasks in CD-CHO media (Invitrogen, Carlsbad Calif.) supplemented with 100 nM Methotrexate and GlutaMAX™-1 (Invitrogen). Cells were transferred from spinner flasks to a 5 L bioreactor (Braun) at an inoculation density of 4×10⁵ viable cells per ml. Parameters were temperature Setpoint 37° C., pH 7.2 (starting Setpoint), with Dissolved Oxygen Setpoint 25% and an air overlay of 0-100 cc/min. At 168 hrs, 250 ml of Feed #1 Medium (CD CHO with 50 g/L Glucose) was added. At 216 hours, 250 ml of Feed #2 Medium (CD CHO with 50 g/L Glucose and 10 mM Sodium Butyrate) was added, and at 264 hours 250 ml of Feed #2 Medium was added. This process resulted in a final productivity of 1600 Units per ml with a maximal cell density of 6×10⁶ cells/ml. The addition of sodium butyrate was to dramatically enhance the production of soluble rHuPH20 in the final stages of production.

[0577] Conditioned media from the 3D35M clone was clarified by depth filtration and tangential flow diafiltration into 10 mM Hepes pH 7.0. Soluble rHuPH20 was then purified by sequential chromatography on Q Sepharose (Pharmacia) ion exchange, Phenyl Sepharose (Pharmacia) hydrophobic interaction chromatography, phenyl boronate (Prometics) and Hydroxapatite Chromatography (Biorad, Richmond, Calif.).

[0578] Soluble rHuPH20 bound to Q Sepharose and eluted at 400 mM NaCl in the same buffer. The eluate was diluted with 2M ammonium sulfate to a final concentration of 500 mM ammonium sulfate and passed through a Phenyl Sepharose (low sub) column, followed by binding under the same conditions to a phenyl boronate resin. The soluble rHuPH20 was eluted from the phenyl sepharose resin in Hepes pH 6.9 after washing at pH 9.0 in 50 mM bicine without ammonium sulfate. The eluate was loaded onto a ceramic hydroxyapatite resin at pH 6.9 in 5 mM potassium phosphate and 1 mM CaCl₂ and eluted with 80 mM potassium phosphate, pH 7.4 with 0.1 mM CaCl₂.

[0579] The resultant purified soluble rHuPH20 possessed a specific activity in excess of 65,000 USP Units/mg protein by way of the microturbidity assay (Example 16) using the USP reference standard. Purified sPH20 eluted as a single peak from 24 to 26 minutes from a Pharmacia 5RPC styrene divinylbenzene column with a gradient between 0.1% TFA/H₂O and 0.1% TFA/90% acetonitrile/10% H₂O and resolved as a single broad 61 kDa band by SDS electrophoresis that reduced to a sharp 51 kDa band upon treatment with PNGASE-F. N-terminal amino acid sequencing revealed that the leader peptide had been efficiently removed.

B. Upstream Cell Culture Expansion Process into 100 L Bioreactor Cell Culture

[0580] A scaled-up process was used to separately purify soluble rHuPH20 from four different vials of 3D35M cell to produce 4 separate batches of sHuPH20; HUA0406C, HUA0410C, HUA0415C and HUA0420C. Each vial was separately expanded and cultured through a 125 L bioreactor, then purified using column chromatography. Samples were taken throughout the process to assess such parameters as enzyme yield. The description of the process provided below sets forth representative specifications for such things as bioreactor starting and feed media volumes, transfer cell densities, and wash and elution volumes. The exact numbers vary slightly with each batch, and are detailed in Tables 3 to 10.

[0581] Four vials of 3D35M cells were thawed in a 37° C. water bath, CD CHO containing 100 nM methotrexate and 40 mL/L GlutaMAX was added and the cells were centrifuged. The cells were re-suspended in a 125 mL shake flask with 20 mL of fresh media and placed in a 37° C., 7% CO₂ incubator. The cells were expanded up to 40 mL in the 125 mL shake flask. When the cell density reached 1.5-2.5×10⁶ cells/mL, the culture was expanded into a 125 mL spinner flask in a 100 mL culture volume. The flask was incubated at 37° C., 7% CO₂. When the cell density reached 1.5-2.5×10⁶ cells/mL, the culture was expanded into a 250 mL spinner flask in 200 mL culture volume, and the flask was incubated at 37° C., 7% CO₂. When the cell density reached 1.5-2.5×10⁶ cells/mL, the culture was expanded into a 1 L spinner flask in 800 mL culture volume and incubated at 37° C., 7% CO₂. When the cell density reached 1.5-2.5×10⁶ cells/mL, the culture was expanded into a 6 L spinner flask in 5 L culture volume and incubated at 37° C., 7% CO₂. When the cell density reached 1.5-2.5×10⁶ cells/mL, the culture was expanded into a 36 L spinner flask in 20 L culture volume and incubated at 37° C., 7% CO₂.

[0582] A 125 L reactor was sterilized with steam at 121° C., 20 PSI and 65 L of CD CHO media was added. Before use, the reactor was checked for contamination. When the cell density in the 36 L spinner flasks reached 1.8-2.5×10⁶ cells/mL, 20 L cell culture were transferred from the 36 L spinner flasks to the 125 L bioreactor (Braun), resulting a final volume of 85 L and a seeding density of approximately 4×10⁵ cells/mL. Parameters were temperature setpoint, 37° C.; pH: 7.2; Dissolved oxygen: 25%±10%; Impeller Speed 50 rpm; Vessel Pressure 3 psi; Air Sparge 1 L/min.; Air Overlay: 1 L/min. The reactor was sampled daily for cell counts, pH verification, media analysis, protein production and retention. Nutrient feeds were added during the run. At Day 6, 3.4 L of Feed #1 Medium (CD CHO+50 g/L Glucose+40 mL/L GlutaMAX™-1) was added, and culture temperature was changed to 36.5° C. At day 9, 3.5 L of Feed #2 (CD CHO+50 g/L Glucose+40 mL/L GlutaMAX™-1+1.1 g/L Sodium Butyrate) was added, and culture temperature was changed to 36° C. At day 11, 3.7 L of Feed #3 (CD CHO+50 g/L Glucose+40 mL/L GlutaMAX™-1+1.1 g/L Sodium Butyrate) was added, and the culture temperature was changed to 35.5° C. The reactor was harvested at 14 days or when the viability of the cells dropped below 50%. The process resulted in production of soluble rHuPH20 with an enzymatic activity of 1600 Units/ml with a maximal cell density of 8 million cells/mL. At harvest, the culture was sampled for mycoplasma, bioburden, endotoxin, and virus in vitro and in vivo, transmission electron microscopy (TEM) for viral particles, and enzyme activity.

[0583] The one hundred liter bioreactor cell culture harvest was filtered through a series of disposable capsule filters having a polyethersulfone medium (Sartorius): first through a 8.0 μm depth capsule, a 0.65 μm depth capsule, a 0.22 μm capsule, and finally through a 0.22 μm Sartopore 2000 cm² filter and into a 100 L sterile storage bag. The culture was concentrated 10× using two TFF with Spiral Polyethersulfone 30 kDa MWCO filters (Millipore), followed by a 6× buffer exchange with 10 mM HEPES, 25 mM Na₂SO₄, pH 7.0 into a 0.22 μm final filter into a 20 L sterile storage bag. Table 10 provides monitoring data related to the cell culture, harvest, concentration and buffer exchange steps.

TABLE 10
Monitoring data for cell culture, harvest, concentration and
buffer exchange steps.

| Parameter | HUA0406C | HUA04010C | HUA0415C | HUA0420C |
|---|---|---|---|---|
| Time from thaw to inoculate | 21 | 19 | 17 | 18 |
| 100 L bioreactor (days) | | | | |
| 100 L inoculation density | 0.45 | 0.33 | 0.44 | 0.46 |
| (×10⁶ cells/mL) | | | | |
| Doubling time in logarithmic | 29.8 | 27.3 | 29.2 | 23.5 |
| growth (hr) | | | | |
| Max. cell density (×10⁶ cells/mL) | 5.65 | 8.70 | 6.07 | 9.70 |
| Harvest viability (%) | 41 | 48 | 41 | 41 |
| Harvest titer (U/ml) | 1964 | 1670 | 991 | 1319 |
| Time in 100-L bioreactor | 13 | 13 | 12 | 13 |
| (days) | | | | |
| Clarified harvest volume (mL) | 81800 | 93300 | 91800 | 89100 |
| Clarified harvest enzyme | 2385 | 1768 | 1039 | 1425 |
| assay (U/mL) | | | | |
| Concentrate enzyme assay | 22954 | 17091 | 8561 | 17785 |
| (U/mL) | | | | |
| Buffer exchanged | 15829 | 11649 | 9915 | 8679 |
| concentrate enzyme assay | | | | |
| (U/mL) | | | | |
| Filtered buffer exchanged | 21550 | 10882 | 9471 | 8527 |
| concentrate enzyme assay | | | | |
| (U/mL) | | | | |
| Buffer exchanged concentrate | 10699 | 13578 | 12727 | 20500 |
| volume (mL) | | | | |
| Ratio enzyme units | 0.87 | 0.96 | 1.32 | 1.4 |
| concentration/harvest | | | | |

[0584] A Q Sepharose (Pharmacia) ion exchange column (3 L resin, Height=20 cm, Diameter=14 cm) was prepared. Wash samples were collected for a determination of pH, conductivity and endotoxin (LAL) assay. The column was equilibrated with 5 column volumes of 10 mM Tris, 20 mM Na₂SO₄, pH 7.5. The concentrated, diafiltered harvest was loaded onto the Q column at a flow rate of 100 cm/hr. The column was washed with 5 column volumes of 10 mM Tris, 20 mM Na₂SO₄, pH 7.5 and 10 mM Hepes, 50 mM NaCl, pH 7.0. The protein was eluted with 10 mM Hepes, 400 mM NaCl, pH 7.0 and filtered through a 0.22 μm final filter into a sterile bag.

[0585] Phenyl-Sepharose (Pharmacia) hydrophobic interaction chromatography was next performed. A Phenyl-Sepharose (PS) column (9.1 L resin, Height=29 cm, Diameter=20 cm) was prepared. The column was equilibrated with 5 column volumes of 5 mM potassium phosphate, 0.5 M ammonium sulfate, 0.1 mM CaCl₂, pH 7.0. The protein eluate from above was supplemented with 2M ammonium sulfate, 1 M potassium phosphate and 1 M CaCl₂ stock solutions to final concentrations of 5 mM, 0.5 M and 0.1 mM, respectively. The protein was loaded onto the PS column at a flow rate of 100 cm/hr. 5 mM potassium phosphate, 0.5 M ammonium sulfate and 0.1 mM CaCl₂ pH 7.0 was added at 100 cm/hr. The flow through was passed through a 0.22 μm final filter into a sterile bag.

[0586] The PS-purified protein was the loaded onto an aminophenyl boronate column (ProMedics) (6.3 L resin, Height=20 cm, Diameter=20 cm) that had been equilibrated with 5 column volumes of 5 mM potassium phosphate, 0.5 M ammonium sulfate. The protein was passed through the column at a flow rate of 100 cm/hr, and the column was washed with 5 mM potassium phosphate, 0.5 M ammonium sulfate, pH 7.0. The column was then washed with 20 mM bicine, 100 mM NaCl, pH 9.0 and the protein eluted with 50 mM Hepes, 100 mM NaCl pH 6.9 through a sterile filter and into a 20 L sterile bag. The eluate was tested for bioburden, protein concentration and enzyme activity.

[0587] A hydroxyapatite (HAP) column (BioRad) (1.6 L resin, Height=10 cm, Diameter=14 cm) was equilibrated with 5 mM potassium phosphate, 100 mM NaCl, 0.1 mM CaCl₂ pH 7.0. Wash samples were collected and tested for pH, conductivity and endotoxin (LAL assay. The aminophenyl boronate purified protein was supplemented with potassium phosphate and CaCl₂ to yield final concentrations of 5 mM potassium phosphate and 0.1 mM CaCl₂ and loaded onto the HAP column at a flow rate of 100 cm/hr. The column was washed with 5 mM potassium phosphate pH 7.0, 100 mM NaCl, 0.1 mM CaCl₂, then 10 mM potassium phosphate pH 7.0, 100 mM NaCl, 0.1 mM CaCl₂ pH. The protein was eluted with 70 mM potassium phosphate pH 7.0 and filtered through a 0.22 μm filter into a 5 L sterile storage bag. The eluate was tested for bioburden, protein concentration and enzyme activity.

[0588] The HAP-purified protein was then pumped through a 20 nM viral removal filter via a pressure tank. The protein was added to the DV20 pressure tank and filter (Pall Corporation), passing through an Ultipor DV20 Filter with 20 nm pores (Pall Corporation) into a sterile 20 L storage bag. The filtrate was tested for protein concentration, enzyme activity, oligosaccharide, monosaccharide and sialic acid profiling, and process-related impurities. The protein in the filtrate was then concentrated to 1 mg/mL using a 10 kD molecular weight cut off (MWCO) Sartocon Slice tangential flow filtration (TFF) system (Sartorius). The filter was first prepared by washing with a Hepes/saline solution (10 mM Hepes, 130 mM NaCl, pH 7.0) and the permeate was sampled for pH and conductivity. Following concentration, the concentrated protein was sampled and tested for protein concentration and enzyme activity. A 6× buffer exchange was performed on the concentrated protein into the final buffer: 10 mM Hepes, 130 mM NaCl, pH 7.0. The concentrated protein was passed though a 0.22 μm filter into a 20 L sterile storage bag. The protein was sampled and tested for protein concentration, enzyme activity, free sulfydryl groups, oligosaccharide profiling and osmolarity.

[0589] Tables 11 to 17 provide monitoring data related to each of the purification steps described above, for each 3D35M cell lot.

TABLE 11
Q sepharose column data

| Parameter | HUA0406C | HUA0410C | HUA0415C | HUA0420C |
|---|---|---|---|---|
| Load volume (mL) | 10647 | 13524 | 12852 | 20418 |
| Load Volume/Resin | 3.1 | 4.9 | 4.5 | 7.3 |
| Volume ratio | | | | |
| Column Volume (mL) | 2770 | 3840 | 2850 | 2880 |
| Eluate volume (mL) | 6108 | 5923 | 5759 | 6284 |
| Protein Conc. of Eluate (mg/mL) | 2.8 | 3.05 | 2.80 | 2.86 |
| Eluate Enzyme Assay (U/mL) | 24493 | 26683 | 18321 | 21052 |
| Enzyme Yield (%) | 65 | 107 | 87 | 76 |

TABLE 12
Phenyl Sepharose column data

| Parameter | HUA0406C | HUA0410C | HUA0415C | HUA0420C |
|---|---|---|---|---|
| Volume Before Stock | 5670 | 5015 | 5694 | 6251 |
| Solution Addition (mL) | | | | |
| Load Volume (mL) | 7599 | 6693 | 7631 | 8360 |
| Column Volume (mL) | 9106 | 9420 | 9340 | 9420 |
| Load Volume/Resin | 0.8 | 0.71 | 0.82 | 0.89 |
| Volume ratio | | | | |
| Eluate volume (mL) | 16144 | 18010 | 16960 | 17328 |
| Protein Cone of Eluate (mg/mL) | 0.4 | 0.33 | 0.33 | 0.38 |
| Eluate Enzyme Assay (U/mL) | 8806 | 6585 | 4472 | 7509 |
| Protein Yield (%) | 41 | 40 | 36 | 37 |
| Enzyme Yield (%) | 102 | 88 | 82 | 96 |

TABLE 13
Amino Phenyl Boronate column data

| Parameter | HUA0406C | HUA0410C | HUA0415C | HUA0420C |
|---|---|---|---|---|
| Load Volume (mL) | 16136 | 17958 | 16931 | 17884 |
| Load Volume/Resin | 2.99 | 3.15 | 3.08 | 2.98 |
| Volume ratio | | | | |
| Column Volume (mL) | 5400 | 5700 | 5500 | 5300 |
| Eluate volume (mL) | 17595 | 22084 | 20686 | 19145 |
| Protein Conc. of Eluate | 0.0 | 0.03 | 0.03 | 0.04 |
| (mg/mL) | | | | |
| Protein Conc. of | not tested | 0.03 | 0.00 | 0.04 |
| Filtered Eluate (mg/mL) | | | | |
| Eluate Enzyme Assay (U/mL) | 4050 | 2410 | 1523 | 4721 |
| Protein Yield (%) | 0 | 11 | 11 | 12 |
| Enzyme Yield (%) | not | 41 | 40 | 69 |
| | determined | | | |

TABLE 14
Hydroxyapatite column data

| Parameter | HUA0406C | HUA0410C | HUA0415C | HUA0420C |
|---|---|---|---|---|
| Volume Before Stock | 16345 | 20799 | 20640 | 19103 |
| Solution Addition (mL) | | | | |
| Load Volume/Resin | 10.95 | 13.58 | 14.19 | 12.81 |
| Volume ratio | | | | |
| Column Volume (mL) | 1500 | 1540 | 1462 | 1500 |
| Load volume (mL) | 16429 | 20917 | 20746 | 19213 |
| Eluate volume (mL) | 4100 | 2415 | 1936 | 2419 |
| Protein Conc. of Eluate (mg/mL) | not tested | 0.24 | 0.17 | 0.23 |
| Protein Conc. of | NA | NA | 0.17 | NA |
| Filtered Eluate (mg/mL) | | | | |
| Eluate Enzyme Assay (U/mL) | 14051 | 29089 | 20424 | 29826 |
| Protein Yield (%) | Not tested | 93 | 53 | 73 |
| Enzyme Yield (%) | 87 | 118 | 140 | 104 |

TABLE 15
DV20 filtration data

| Parameter | HUA0406C | HUA0410C | HUA0415C | HUA0420C |
|---|---|---|---|---|
| Start volume | 4077 | 2233 | 1917 | 2419 |
| (mL) | | | | |
| Filtrate Volume | 4602 | 3334 | 2963 | 3504 |
| (mL) | | | | |
| Protein Conc. | 0.1 | NA | 0.09 | NA |
| of Filtrate | | | | |
| (mg/mL) | | | | |
| Protein Conc. | NA | 0.15 | 0.09 | 0.16 |
| of Filtered | | | | |
| Eluate | | | | |
| (mg/mL) | | | | |
| Protein Yield | not tested | 93 | 82 | 101 |
| (%) | | | | |

TABLE 16
Final concentration data

| Parameter | HUA0406C | HUA0410C | HUA0415C | HUA0420C |
|---|---|---|---|---|
| Start volume | 4575 | 3298 | 2963 | 3492 |
| (mL) | | | | |
| Concentrate | 562 | 407 | 237 | 316 |
| Volume (mL) | | | | |
| Protein Conc. | 0.9 | 1.24 | 1.16 | 1.73 |
| of Concentrate | | | | |
| (mg/mL) | | | | |
| Protein Yield | 111 | 102 | 103 | 98 |
| (%) | | | | |

TABLE 17
Buffer Exchange into Final Formulation data

| Parameter | HUA0406C | HUA0410C | HUA0415C | HUA0420C |
|---|---|---|---|---|
| Start Volume | 562 | 407 | 237 | 316 |
| (mL) | | | | |
| Final Volume | 594 | 516 | 310 | 554 |
| Buffer | | | | |
| Exchanged | | | | |
| Concentrate | | | | |
| (mL) | | | | |
| Protein Conc. | 1.00 | 0.97 | 0.98 | 1.00 |
| of Concentrate | | | | |
| (mg/mL) | | | | |
| Protein Conc. | 0.95 | 0.92 | 0.95 | 1.02 |
| of Filtered | | | | |
| Concentrate | | | | |
| (mg/mL) | | | | |
| Protein Yield | 118 | 99 | 110 | 101 |
| (%) | | | | |

[0590] The purified and concentrated soluble rHuPH20 protein was aseptically filled into sterile vials with 5 mL and 1 mL fill volumes. The protein was passed though a 0.22 μm filter to an operator controlled pump that was used to fill the vials using a gravimetric readout. The vials were closed with stoppers and secured with crimped caps. The closed vials were visually inspected for foreign particles and then labeled. Following labeling, the vials were flash-frozen by submersion in liquid nitrogen for no longer than 1 minute and stored at ≦15° C. (−20±5° C.).

### Example 14

### Production of Gen2 Cells Containing Soluble Human PH20 (rHuPH20)

[0591] The Gen13D35M cell line described in Example 12 was adapted to higher methotrexate levels to produce generation 2 (Gen2) clones. 3D35M cells were seeded from established methotrexate-containing cultures into CD CHO medium containing 4 mM GlutaMAX™-1™ and 1.0 μM methotrexate. The cells were adapted to a higher methotrexate level by growing and passaging them 9 times over a period of 46 days in a 37° C., 7% CO₂ humidified incubator. The amplified population of cells was cloned out by limiting dilution in 96-well tissue culture plates containing medium with 2.0 μM methotrexate. After approximately 4 weeks, clones were identified and clone 3E10B was selected for expansion. 3E10B cells were grown in CD CHO medium containing 4 mM GlutaMAX-1™ and 2.0 μM methotrexate for 20 passages. A master cell bank (MCB) of the 3E10B cell line was created and frozen and used for subsequent studies.

[0592] Amplification of the cell line continued by culturing 3E10B cells in CD CHO medium containing 4 mM GlutaMAX-1™ and 4.0 μM methotrexate. After the 12^{th} passage, cells were frozen in vials as a research cell bank (RCB). One vial of the RCB was thawed and cultured in medium containing 8.0 μM methotrexate. After 5 days, the methotrexate concentration in the medium was increased to 16.0 μM, then 20.0 μM 18 days later. Cells from the 8^{th} passage in medium containing 20.0 μM methotrexate were cloned out by limiting dilution in 96-well tissue culture plates containing CD CHO medium containing 4 mM GlutaMAX-1™ and 20.0 μM methotrexate. Clones were identified 5-6 weeks later and clone 2B2 was selected for expansion in medium containing 20.0 μM methotrexate. After the 11th passage, 2B2 cells were frozen in vials as a research cell bank (RCB).

[0593] The resultant 2B2 cells are dihydrofolate reductase deficient (dhfr-) DG44 CHO cells that express soluble recombinant human PH20 (rHuPH20). The soluble PH20 is present in 2B2 cells at a copy number of approximately 206 copies/cell. Southern blot analysis of Spe I-, Xba I- and BamH I/Hind III-digested genomic 2B2 cell DNA using a rHuPH20-specific probe revealed the following restriction digest profile: one major hybridizing band of ˜7.7 kb and four minor hybridizing bands (˜13.9, ˜6.6, ˜5.7 and ˜4.6 kb) with DNA digested with Spe I; one major hybridizing band of ˜5.0 kb and two minor hybridizing bands (˜13.9 and ˜6.5 kb) with DNA digested with Xba I; and one single hybridizing band of ˜1.4 kb observed using 2B2 DNA digested with BamH I/Hind III.

### Example 15

### A. Production of Gen2 Soluble rHuPH20 in 300 L Bioreactor Cell Culture

[0594] A vial of HZ24-2B2 was thawed and expanded from shaker flasks through 36 L spinner flasks in CD-CHO media (Invitrogen, Carlsbad, Calif.) supplemented with 20 μM methotrexate and GlutaMAX-1™ (Invitrogen). Briefly, the a vial of cells was thawed in a 37° C. water bath, media was added and the cells were centrifuged. The cells were re-suspended in a 125 mL shake flask with 20 mL of fresh media and placed in a 37° C., 7% CO₂ incubator. The cells were expanded up to 40 mL in the 125 mL shake flask. When the cell density reached greater than 1.5×10⁶ cells/mL, the culture was expanded into a 125 mL spinner flask in a 100 mL culture volume. The flask was incubated at 37° C., 7% CO₂. When the cell density reached greater than 1.5×10⁶ cells/mL, the culture was expanded into a 250 mL spinner flask in 200 mL culture volume, and the flask was incubated at 37° C., 7% CO₂. When the cell density reached greater than 1.5×10⁶ cells/mL, the culture was expanded into a 1 L spinner flask in 800 mL culture volume and incubated at 37° C., 7% CO₂. When the cell density reached greater than 1.5×10⁶ cells/mL the culture was expanded into a 6 L spinner flask in 5000 mL culture volume and incubated at 37° C., 7% CO₂. When the cell density reached greater than 1.5×10⁶ cells/mL the culture was expanded into a 36 L spinner flask in 32 L culture volume and incubated at 37° C., 7% CO₂.

[0595] A 400 L reactor was sterilized and 230 mL of CD-CHO media was added. Before use, the reactor was checked for contamination. Approximately 30 L cells were transferred from the 36 L spinner flasks to the 400 L bioreactor (Braun) at an inoculation density of 4.0×10⁵ viable cells per ml and a total volume of 260 L. Parameters were temperature setpoint, 37° C.; Impeller Speed 40-55 RPM; Vessel Pressure: 3 psi; Air Sparge 0.5-1.5 L/Min.; Air Overlay: 3 L/min. The reactor was sampled daily for cell counts, pH verification, media analysis, protein production and retention. Also, during the run nutrient feeds were added. At 120 hrs (day 5), 10.4 L of Feed #1 Medium (4×CD-CHO+33 g/L Glucose+160 mL/L Glutamax-1™+83 mL/L Yeastolate+33 mg/L rHulnsulin) was added. At 168 hours (day 7), 10.8 L of Feed #2 (2×CD-CHO+33 g/L Glucose+80 mL/L Glutamax-1™+167 mL/L Yeastolate+0.92 g/L Sodium Butyrate) was added, and culture temperature was changed to 36.5° C. At 216 hours (day 9), 10.8 L of Feed #3 (1× CD-CHO+50 g/L Glucose+50 mL/L Glutamax-1™+250 mL/L Yeastolate+1.80 g/L Sodium Butyrate) was added, and culture temperature was changed to 36° C. At 264 hours (day 11), 10.8 L of Feed #4 (1× CD-CHO+33 g/L Glucose+33 mL/L Glutamax-1™+250 mL/L Yeastolate+0.92 g/L Sodium Butyrate) was added, and culture temperature was changed to 35.5° C. The addition of the feed media was observed to dramatically enhance the production of soluble rHuPH20 in the final stages of production. The reactor was harvested at 14 or 15 days or when the viability of the cells dropped below 40%. The process resulted in a final productivity of 17,000 Units per ml with a maximal cell density of 12 million cells/mL. At harvest, the culture was sampled for mycoplasma, bioburden, endotoxin and viral in vitro and in vivo, Transmission Electron Microscopy (TEM) and enzyme activity.

[0596] The culture was pumped by a peristaltic pump through four Millistak filtration system modules (Millipore) in parallel, each containing a layer of diatomaceous earth graded to 4-8 μm and a layer of diatomaceous earth graded to 1.4-1.1 μm, followed by a cellulose membrane, then through a second single Millistak filtration system (Millipore) containing a layer of diatomaceous earth graded to 0.4-0.11 μm and a layer of diatomaceous earth graded to <0.1 μm, followed by a cellulose membrane, and then through a 0.22 μm final filter into a sterile single use flexible bag with a 350 L capacity. The harvested cell culture fluid was supplemented with 10 mM EDTA and 10 mM Tris to a pH of 7.5. The culture was concentrated 10× with a tangential flow filtration (TFF) apparatus using four Sartoslice TFF 30 kDa molecular weight cut-off (MWCO) polyether sulfone (PES) filter (Sartorious), followed by a 10× buffer exchange with 10 mM Tris, 20 mM Na₂SO₄, pH 7.5 into a 0.22 μm final filter into a 50 L sterile storage bag.

[0597] The concentrated, diafiltered harvest was inactivated for virus. Prior to viral inactivation, a solution of 10% Triton X-100, 3% tri (n-butyl) phosphate (TNBP) was prepared. The concentrated, diafiltered harvest was exposed to 1% Triton X-100, 0.3% TNBP for 1 hour in a 36 L glass reaction vessel immediately prior to purification on the Q column.

### B. Purification of Gen2 Soluble rHuPH20

[0598] A Q Sepharose (Pharmacia) ion exchange column (9 L resin, H=29 cm, D=20 cm) was prepared. Wash samples were collected for a determination of pH, conductivity and endotoxin (LAL) assay. The column was equilibrated with 5 column volumes of 10 mM Tris, 20 mM Na2SO4, pH 7.5. Following viral inactivation, the concentrated, diafiltered harvest was loaded onto the Q column at a flow rate of 100 cm/hr. The column was washed with 5 column volumes of 10 mM Tris, 20 mM Na2SO4, pH 7.5 and 10 mM Hepes, 50 mM NaCl, pH7.0. The protein was eluted with 10 mM Hepes, 400 mM NaCl, pH 7.0 into a 0.22 μm final filter into sterile bag. The eluate sample was tested for bioburden, protein concentration and hyaluronidase activity. A₂₈₀ absorbance reading were taken at the beginning and end of the exchange.

[0599] Phenyl-Sepharose (Pharmacia) hydrophobic interaction chromatography was next performed. A Phenyl-Speharose (PS) column (19-21 L resin, H=29 cm, D=30 cm) was prepared. The wash was collected and sampled for pH, conductivity and endotoxin (LAL assay). The column was equilibrated with 5 column volumes of 5 mM potassium phosphate, 0.5 M ammonium sulfate, 0.1 mM CaCl₂, pH 7.0. The protein eluate from the Q sepharose column was supplemented with 2M ammonium sulfate, 1 M potassium phosphate and 1 M CaCl₂ stock solutions to yield final concentrations of 5 mM, 0.5 M and 0.1 mM, respectively. The protein was loaded onto the PS column at a flow rate of 100 cm/hr and the column flow thru collected. The column was washed with 5 mM potassium phosphate, 0.5 M ammonium sulfate and 0.1 mM CaCl2 pH 7.0 at 100 cm/hr and the wash was added to the collected flow thru. Combined with the column wash, the flow through was passed through a 0.22 μm final filter into a sterile bag. The flow through was sampled for bioburden, protein concentration and enzyme activity.

[0600] An aminophenyl boronate column (Promtics) was prepared. The wash was collected and sampled for pH, conductivity and endotoxin (LAL assay). The column was equilibrated with 5 column volumes of 5 mM potassium phosphate, 0.5 M ammonium sulfate. The PS flow through containing purified protein was loaded onto the aminophenyl boronate column at a flow rate of 100 cm/hr. The column was washed with 5 mM potassium phosphate, 0.5 M ammonium sulfate, pH 7.0. The column was washed with 20 mM bicine, 0.5 M ammonium sulfate, pH 9.0. The column was washed with 20 mM bicine, 100 mM sodium chloride, pH 9.0. The protein was eluted with 50 mM Hepes, 100 mM NaCl, pH 6.9 and passed through a sterile filter into a sterile bag. The eluted sample was tested for bioburden, protein concentration and enzyme activity.

[0601] The hydroxyapatite (HAP) column (Biorad) was prepared. The wash was collected and test for pH, conductivity and endotoxin (LAL assay). The column was equilibrated with 5 mM potassium phosphate, 100 mM NaCl-10.1 mM CaCl₂, pH 7.0. The aminophenyl boronate purified protein was supplemented to final concentrations of 5 mM potassium phosphate and 0.1 mM CaCl₂ and loaded onto the HAP column at a flow rate of 100 cm/hr. The column was washed with 5 mM potassium phosphate, pH 7, 100 mM NaCl, 0.1 mM CaCl₂. The column was next washed with 10 mM potassium phosphate, pH 7, 100 mM NaCl, 0.1 mM CaCl₂. The protein was eluted with 70 mM potassium phosphate, pH 7.0 and passed through a 0.22 μm sterile filter into a sterile bag. The eluted sample was tested for bioburden, protein concentration and enzyme activity.

[0602] The HAP purified protein was then passed through a viral removal filter. The sterilized Viosart filter (Sartorius) was first prepared by washing with 2 L of 70 mM potassium phosphate, pH 7.0. Before use, the filtered buffer was sampled for pH and conductivity. The HAP purified protein was pumped via a peristaltic pump through the 20 nM viral removal filter. The filtered protein in 70 mM potassium phosphate, pH 7.0 was passed through a 0.22 μm final filter into a sterile bag. The viral filtered sample was tested for protein concentration, enzyme activity, oligosaccharide, monosaccharide and sialic acid profiling. The sample also was tested for process related impurities.

[0603] The protein in the filtrate was then concentrated to 10 mg/mL using a 10 kD molecular weight cut off (MWCO) Sartocon Slice tangential flow filtration (TFF) system (Sartorius). The filter was first prepared by washing with 10 mM histidine, 130 mM NaCl, pH 6.0 and the permeate was sampled for pH and conductivity. Following concentration, the concentrated protein was sampled and tested for protein concentration and enzyme activity. A 6× buffer exchange was performed on the concentrated protein into the final buffer: 10 mM histidine, 130 mM NaCl, pH 6.0. Following buffer exchange, the concentrated protein was passed though a 0.22 μm filter into a 20 L sterile storage bag. The protein was sampled and tested for protein concentration, enzyme activity, free sulfydryl groups, oligosaccharide profiling and osmolarity.

[0604] The sterile filtered bulk protein was then asceptically dispensed at 20 mL into 30 mL sterile Teflon vials (Nalgene). The vials were then flash frozen and stored at −20±5° C.

### C. Comparison of Production and Purification of Gen1 Soluble rHuPH20 and Gen2 Soluble rHuPH20

[0605] The production and purification of Gen2 soluble rHuPH20 in a 300 L bioreactor cell culture contained some changes in the protocols compared to the production and purification Gen1 soluble rHuPH20 in a 100 L bioreactor cell culture (described in Example 13.B). Table 18 sets forth exemplary differences, in addition to simple scale up changes, between the methods.

TABLE 18

| Process Difference | Gen1 soluble rHuPH20 | Gen2 soluble rHuPH20 |
|---|---|---|
| Cell line | 3D35M | 2B2 |
| Media used to expand | Contains 0.10 μM | Contains 20 μM |
| cell inoculum | methotrexate (0.045 mg/L) | methotrexate (9 mg/L) |
| Media in 6 L cultures | Contains 0.10 μM | Contains no |
| onwards | methotrexate | methotrexate |
| 36 L spinner flask | No instrumentation | Equipped with |
| | 20 L operating volume. | instrumentation that |
| | | monitors and controls |
| | | pH, dissolved oxygen, |
| | | sparge and overlay gas |
| | | flow rate. |
| | | 32 L operating volume |
| Final operating volume | Approx. 100 L in a 125 L | Approx. 300 L in a 400 L |
| in bioreactor | bioreactor | bioreactor (initial culture |
| | (initial culture volume + | volume + 260 L) |
| | 65 L) | |
| Culture media in final | No rHuInsulin | 5.0 mg/L rHuInsulin |
| bioreactor | | |
| Media feed volume | Scaled at 4% of the | Scaled at 4% of the |
| | bioreactor cell culture | bioreactor cell culture |
| | volume i.e. 3.4, 3.5 and | volume i.e. 10.4, 10.8, |
| | 3.7 L, resulting in a | 11.2 and 11.7 L, |
| | target bioreactor volume | resulting in a target |
| | of ~92 L. | bioreactor volume of |
| | | ~303 L. |
| Media feed | Feed #1 Medium: CD | Feed #1 Medium: 4x CD |
| | CHO + 50 g/L Glucose + | CHO + 33 g/L Glucose + |
| | 8 mM GlutaMAX ™-1 | 32 mM Glutamax + |
| | Feed #2 (CD CHO + 50 g/L | 16.6 g/L Yeastolate + 33 mg/L |
| | Glucose + 8 mM | rHuInsulin |
| | GlutaMAX + 1.1 g/L | Feed #2: 2x CD CHO + |
| | Sodium Butyrate | 33 g/L Glucose + 16 mM |
| | Feed #3: CD CHO + 50 g/L | Glutamax + 33.4 g/L |
| | Glucose + 8 mM | Yeastolate + 0.92 g/L |
| | GlutaMAX + 1.1 g/L | Sodium Butyrate |
| | Sodium Butyrate | Feed #3: 1x CD CHO + |
| | | 50 g/L Glucose + 10 mM |
| | | Glutamax + 50 g/L |
| | | Yeastolate + 1.80 g/L |
| | | Sodium Butyrate |
| | | Feed #4: 1x CD CHO + |
| | | 33 g/L Glucose + 6.6 mM |
| | | Glutamax + 50 g/L |
| | | Yeastolate + 0.92 g/L |
| | | Sodium Butyrate |
| Filtration of bioreactor | Four polyethersulfone | 1^{st} stage - Four modules |
| cell culture | filters (8.0 μm, 0.65 μm, | in parallel, each with a |
| | 0.22 μm and 0.22 μm) in | layer of diatomaceous |
| | series | earth graded to 4-8 μm |
| | 100 L storage bag | and a layer of |
| | | diatomaceous earth |
| | | graded to 1.4-1.1 μm, |
| | | followed by a cellulose |
| | | membrane. |
| | | 2^{nd} stage - single module |
| | | containing a layer of |
| | | diatomaceous earth |
| | | graded to 0.4-0.11 μm |
| | | and a layer of |
| | | diatomaceous earth |
| | | graded to <0.1 μm, |
| | | followed by a cellulose |
| | | membrane. |
| | | 3^{rd} stage - 0.22 μm |
| | | polyethersulfone filter |
| | | 300 L storage bag |
| | | Harvested cell culture is |
| | | supplemented with 10 mM |
| | | EDTA, 10 mM Tris |
| | | to a pH of 7.5. |
| Concentration and | Concentrate with 2 TFF | Concentrate using four |
| buffer exchange prior to | with Millipore Spiral | Sartorius Sartoslice TFF |
| chromatography | Polyethersulfone 30K | 30K MWCO Filter |
| | MWCO Filter | Buffer Exchange the |
| | Buffer Exchange the | Concentrate 10× with 10 mM |
| | Concentrate 6× with 10 mM | Tris, 20 mM |
| | Hepes, 25 mM | Na2SO4, pH 7.5 |
| | NaCl, pH 7.0 | 50 L sterile storage bag |
| | 20 L sterile storage bag | |
| Viral inactivation prior to | None | Viral inactivation |
| chromatography | | performed with the |
| | | addition of a 1% Triton |
| | | X-100, 0.3% Tributyl |
| | | Phosphate, pH 7.5, |
| 1^{st} purification step (Q | No absorbance reading | A280 measurements at |
| sepharose) | | the beginning and end |
| Viral filtration after | Pall DV-20 filter (20 nm) | Sartorius Virosart filter |
| chromatography | | (20 nm) |
| Concentration and | Hepes/saline pH 7.0 | Histidine/saline, pH 6.0 |
| buffer exchange after | buffer | buffer |
| chromatography | Protein concentrated to | Protein concentrated to |
| | 1 mg/ml | 10 mg/ml |

### Example 16

### Determination of Hyaluronidase Activity of Soluble rHuPH20

[0606] Hyaluronidase activity of soluble rHuPH20 in samples such as cell cultures, purification fractions and purified solutions was determined using a tubidometric assay, which based on the formation of an insoluble precipitate when hyaluronic acid binds with serum albumin. The activity is measured by incubating soluble rHuPH20 with sodium hyaluronate (hyaluronic acid) for a set period of time (10 minutes) and then precipitating the undigested sodium hyaluronate with the addition of acidified serum albumin. The turbidity of the resulting sample is measured at 640 nm after a 30 minute development period. The decrease in turbidity resulting from enzyme activity on the sodium hyaluronate substrate is a measure of the soluble rHuPH20 enzymatic activity. The method is run using a calibration curve generated with dilutions of a soluble rHuPH20 assay working reference standard, and sample activity measurements are made relative to this calibration curve.

[0607] Dilutions of the sample were prepared in Enzyme Dilurent Solutions. The Enzyme Diluent Solution was prepared by dissolving 33.0±0.05 mg of hydrolyzed gelatin in 25.0 mL of the 50 mM PIPES Reaction Buffer (140 mM NaCl, 50 mM PIPES, pH 5.5) and 25.0 mL of SWFI, and diluting 0.2 mL of 25% Buminate solution into the mixture and vortexing for 30 seconds. This was performed within 2 hours of use and stored on ice until needed. The samples were diluted to an estimated 1-2 U/mL. Generally, the maximum dilution per step did not exceed 1:100 and the initial sample size for the first dilution was not be less than 20 μL. The minimum sample volumes needed to perform the assay were: In-process Samples, FPLC Fractions: 80 μL; Tissue Culture Supernatants: 1 mL; Concentrated Material 80 μL; Purified or Final Step Material: 80 μL. The dilutions were made in triplicate in a Low Protein Binding 96-well plate, and 30 μL of each dilution was transferred to Optilux black/clear bottom plates (BD BioSciences).

[0608] Dilutions of known soluble rHuPH20 with a concentration of 2.5 U/mL were prepared in Enzyme Diluent Solution to generate a standard curve and added to the Optilux plate in triplicate. The dilutions included 0 U/mL, 0.25 U/mL, 0.5 U/mL, 1.0 U/mL, 1.5 U/mL, 2.0 U/mL, and 2.5 U/mL. “Reagent blank” wells that contained 60 μL of Enzyme Diluent Solution were included in the plate as a negative control. The plate was then covered and warmed on a heat block for 5 minutes at 37° C. The cover was removed and the plate was shaken for 10 seconds. After shaking, the plate was returned to the plate to the heat block and the MULTIDROP 384 Liquid Handling Device was primed with the warm 0.25 mg/mL sodium hyaluronate solution (prepared by dissolving 100 mg of sodium hyaluronate (LifeCore Biomedical) in 20.0 mL of SWFI. This was mixed by gently rotating and/or rocking at 2-8° C. for 2-4 hours, or until completely dissolved). The reaction plate was transferred to the MULTIDROP 384 and the reaction was initiated by pressing the start key to dispense 30 μL sodium hyaluronate into each well. The plate was then removed from the MULTIDROP 384 and shaken for 10 seconds before being transferred to a heat block with the plate cover replaced. The plate was incubated at 37° C. for 10 minutes

[0609] The MULTIDROP 384 was prepared to stop the reaction by priming the machine with Serum Working Solution and changing the volume setting to 240 μL. (25 mL of Serum Stock Solution [1 volume of Horse Serum (Sigma) was diluted with 9 volumes of 500 mM Acetate Buffer Solution and the pH was adjusted to 3.1 with hydrochloric acid] in 75 mL of 500 mM Acetate Buffer Solution). The plate was removed from the heat block and placed onto the MULTIDROP 384 and 240 μL of serum Working Solutions was dispensed into the wells. The plate was removed and shaken on a plate reader for 10 seconds. After a further 15 minutes, the turbidity of the samples was measured at 640 nm and the enzyme activity (in U/mL) of each sample was determined by fitting to the standard curve.

[0610] Specific activity (U/mg) was calculated by dividing the enzyme activity (U/ml) by the protein concentration (mg/mL).

### Example 17

### Cathepsin-L Severs Fibrous Septae in the Subcutaneous Space of Zucker Rats

[0611] Zucker rats were treated by administration of 90 μg/ml cathepsin-L in MES buffer, pH 5.3 and histology performed on skin sections to visualize the fibrous septae. As a control, rats were treated with MES buffer, pH 5.3 alone. Sections were fixed and stained with Masson's Trichrome staining for visualization of collagen as described in Example 5. Sections also were stained with Hemotoxylin and Eosin. Briefly, sections were deparraffinzed and hydrated to water. If the sections were Zenker-fixed, the mercuric chloride crystals were removed with iodine and cleared with sodium thiosulphate. Samples were stained with Mayer's hematoxylin for 15 minutes, followed by washing in running tap water for 20 minutes. The sections were counter-stained with eosin for 15 seconds to 2 minutes depending on the age of the eosin, and the depth of the counterstain desired. For even staining results, the slides were dipped several times before allowing them to set in the eosin. The sections were dehydrated in 95% and absolute alcohols with two changes of two minutes each until excess eosin was removed. The slides were checked under a microscope before being cleared in xylene with two changes of two minutes each. Sections were mounted in Permount or Histoclad. The results show that in control animals treated with acidic buffer only, the hypodermal adipose lobules were separated by a complex network of collagen fibrous septae extending perpendicularly to the skin surface. Treatment of rats with cathepsin-L results in degradation of the hypodermis fibrous septae.

[0612] The organization of the fibrous septae was further visualized with a rabbit anti-collagen antibody following treatment with MES buffer, pH 5.3 without cathepsin-L, with 90 μg/ml cathepsin-L or with 90 μg/ml bacterial collagenase in 50 mM HEPES buffer, pH 7.4. The results show a normal collagen distribution in control rats treated with acidic MES buffer only. Treatment of rats with cathepsin-L showed a decreased staining for collagen evidencing degradation of collagen. The degradation of collagen, however, was much more pronounced by treatment of rats with bacterial collagenase. These results demonstrate that cathepsin-L has a greater temporal control of collagen degradation compared to bacterial collagenase.

### Example 18

### Duration of Enzymatic Action of Cathepsin-L in Zucker Rat Dermis

[0613] The duration of the enzymatic action of cathepsin-L was assessed in the dermis of Zucker rat using two complementary methods: Western blots and enzymatic activity. Rats were injected in the dermis with 1 mL of 1200 units/ml of rHuPH20, pH 5.3, containing epinephrine (2.5 ug/mL) to induce vascular contraction. This was immediately followed by an injection of 1 mL of 100 μg/mL of recombinant cathepsin-L, pH 5.3, in 50 mM MES buffer. Incisions were made in the injection site and interstitium perfusate was collected from 3 to 70 minutes post-injection with a 20 μL and 200 μL Eppendorf pipet. The fluid was analyzed by Western blot analysis for collagen degradation as described in Example 10 and by measuring the enzymatic activity of cathepsin-L as determined from the rate of hydrolysis of a commercially available fluorogenic substrate, which activity is expressed as relative fluorescence units (RFU)/minute, designated as Z-Leu-Arg-AMC, over one hour as described in Example 9. pH values of the interstitial fluid perfusate was recorded using pH indicator strips (EMD Chemicals, Inc., Gibbstown, N.J., Cat#9588). The data are shown in Table 19.

[0614] Maximal enzymatic activity was measured within 10 minutes post treatment. Activity decreased by about 50% at 30 min and about 70% at 60 min following the administration in the dermis.

TABLE 19
Time after administration in relation with cathepsin-L activity
and pH of the interstitium fluid following administration of
100 μg/mL of recombinant cathepsin-L, pH 5.3.

| | Cathepsin-L | |
|---|---|---|
| Time | activity | pH of the |
| (min post injection) | (RFU/min) | perfusate |
| 9 | 1930 | 5-5.5 |
| 12 | 1917 | 5-5.5 |
| 15 | 1759 | 5-5.5 |
| 18 | 1261 | 5-5.5 |
| 21 | 1165 | 5-5.5 |
| 25 | 1115 | 5.5 |
| 30 | 950 | 5.5-6 |
| 40 | 669 | 5.5-6 |
| 60 | 636 | 6 |

### Example 19

### Dose-Response Effect of Cathepsin-L on Collagen Degradation in Zucker Rat Dermis

[0615] Following administration of 1 ml of 1200 U/ml of rHuPH20, pH 5.3 in the dermis of Zucker rats, 1 ml of cathepsin-L doses ranging from 1 μg/mL to 500 μg/mL were administered into the dermis of Zucker rats. Twenty minutes post-injection, biopsies were collected, fixed in Bouin's fixative, and processed for histology. Sections were stained with Hematoxylin and Eosin, and Masson's Trichrome for visualization of collagen as described in Example 5. Incisions were made with a scalper in the injection site and interstitium fluid was collected.

[0616] Histological analysis of the treated skin and Western blot analysis of the perfusates were carried out as described in Examples 5 and 10, respectively. An aliquot of 25 μL of interstitium fluid was mixed with 5 μL of 6× gel loading sample buffer for SDS-PAGE. The total volume of samples were loaded onto 4-12% Tris-Glycine gels (Invitrogen, Carlsbad, Calif., Cat# EC6038) and electrophoresis was carried out in Tris-Glycine SDS running buffer until the dye front of the prestained molecular weight markers (Invitrogen, Cat# LC5925) reached the bottom of the gel. The proteins were transferred onto a nitrocellulose membrane (Invitrogen, Cat#LC2001) using the XCell II Blot module (Invitrogen, Cat# IB1001) at 20V for 1.5 hours at 4° C. in a buffer of 20% Methanol, 25 mM Tris, and 220 mM Glycine. Transfer was verified by the almost complete absence of color of the prestained marker bands on the gel. The membrane was blocked in a buffer consisting of 2% non fat dry milk in PBST (phosphate-buffered saline (PBS) solution (137 mM NaCl, 2.7 mM KCl, 10 mM phosphate, pH 7.4), with the detergent Tween 20 (0.05% v/v) for use as a wash buffer and diluent for ELISA) for 30 minutes at room temperature. Collagen I was detected with a rabbit polyclonal antibody to human collagen I (Abcam, Cambridge, Mass., Cat#ab34710) used at 1 μg/mL final concentration in PBST and incubated at room temperature for 1 hour followed by a HRP conjugated goat anti-rabbit IgG (Calbiochem, San Diego, Calif., Cat#DC03L) used at a concentration of 33 ng/mL in PBST for 1 hr at room temperature. The HRP signal was developed by the TMB Insoluble (Calbiochem, Cat# 613548) membrane development solution and the reaction was stopped by rinsing in ddH2O after 5-10 minutes at room temperature.

[0617] Histological and western blot analysis showed that increased doses of cathepsin-L resulted in dose dependent collagen degradation. Western blot analysis indicated that higher concentrations of cathepsin-L resulted in more extensive collagen degradation as judged by the presence of numerous low molecular weight bands in the samples treated with 100 μg/mL.

### Example 20

### Dose-Dependent Effect of Cathepsin-L on Fibrous Septae Disruption

[0618] Following administration of 1 mL of 1200 U/ml of rHuPH20 in 50 mM MES, 150 mM NaCl, pH 5.3, Zucker rats were administered 1 mL of human recombinant cathepsin-L doses ranging from 1, 10, 50, 100, 250, and 500 μg/mL in MES buffer, pH 5.3, to the dermis. As a control, rats were treated with MES buffer, pH 5.3, alone. Twenty minutes post injection, the interstitium perfusates were collected from the injection sites as described in Example 18. Skin biopsies were collected, fixed in Bouin's fixative and processed for histology. Deparaffined sections were stained with Hematoxylin and Eosin, and Masson's Trichrome for visualization of collagen as described in Example 5. Western blots were carried out as described in Example 10.

[0619] Results from histology and Western blot analysis showed that recombinant cathepsin-L degradation of collagen in the Zucker rat was dose dependent. Disruption of the fibrous septae was clearly visible in the skin treated with 10 μg/mL of cathepsin-L.

### Example 21

### Effect of Ionic Strength on the Effect of Cathepsin-L in Zucker Rat Dermis

[0620] The time period of cathepsin-L enzymatic activity injected in the dermis was studied as a function of the ionic strength of the buffer and epinephrine.

[0621] Zucker rats were injected with 1 mL of 1200 U/ml rHuPH20 followed by 1 mL of 25 μg/mL cathepsin-L in 1, 5, 10 and 50 mM of MES buffer, 150 mM NaCl, pH 5.3. The interstitium perfusate was collected at 20 minutes post administration. pH values of the interstitial fluid perfusate was recorded using pH indicator strips (EMD Chemicals, Inc., Gibbstown, N.J., Cat#9588) and cathepsin-L enzymatic activity in the dermis was measured as described in Example 9. pH values of the dermal perfusate was 7.5 for the low ionic buffer strength (1, 5, and 10 mM MES, pH5.3). pH value of the dermal perfusate was 6.5 when cathepsin-L was delivered in 50 mM MES, pH 5.3. No measurable enzymatic activity was detected when cathepsin-L was delivered in low ionic buffer strength (1, 5, and 10 mM MES). Robust enzymatic activity was detected in the perfusate of injection site administered with cathepsin-L formulated in 50 mM MES. These results indicated that the enzymatic activity of cathepsin-L can be tightly modulated by the ionic strength of the buffer.

### Example 22

### Disruption of Fibrous Septae by Cathepsin-L Injected into Zucker Rat Subdermis

[0622] The effect of one single dose of cathepsin-L injected into the subdermis of Zucker rat was assessed in 22 Male Zucker rats treated with either 10 or 100 μg/mL cathepsin-L in 50 mM MES buffer, 150 mM NaCl, pH 5.3 following administration of 1200 U/ml of rHuPH20 in 50 mM MES, 150 mM NaCl, pH 5.3. Biopsies were taken once a week for a period of 20 weeks and analyzed histologically as described in Example 5. A single treatment with either 10 μg/ml or 100 μg/ml dose of cathepsin-L resulted in rapid disruption of the fibrous septae as described in Example 17. Histological analysis of biopsies taken at week 4 indicated that the number of fibrous septae was lower in the treated areas than in the nontreated areas. From week 20 on, the typical vertical orientation of the fibrous septae was not seen in the treated areas. Rather, the orientation of the collagen in the hypodermis was horizontal and parallel to the skin surface, consistent with tissue remodeling.

### Example 23

### Administration of Cathepsin-L is not Associated with Adverse Effects

[0623] Safety study of cathepsin L injected intravascularly shows no obvious adverse effects. 25 g Male balb/c mice (Charles River) and 200 g male Sprague Dawley rats (Harlan Laboratories) were administered recombinant cathepsin L in 50 mM MES, 150 mM NaCl, pH 5.3 at concentrations up to 12 mg/kg in the tail vein. Animals were observed for one week for adverse effects. No adverse effect recorded by cage side observation.

### Example 24

### Cathepsin-L Alters the Structure of the Fibrous Septae Microarchitecture in the Pig Hypodermis

[0624] Anesthetized Yorkshire pigs (SNS farms, Ramona, Ca) received 5 mL of 50 mM MES, 150 mM NaCl buffer at pH 5.3 containing 1200 U/mL of rHuPH20 through a 23-gauge butterfly needle (Terumo, Leuven, Belgium Cat#CE0197) inserted into the hypodermis of the flank, immediately followed by i) 5 mL of 50 μg/ml cathepsin-L in 50 mM MES, 150 mM NaCl buffer, pH 5.3; or ii) 50 μg bacterial collagenase in 50 mM HEPES, 150 mM NaCl buffer, pH 7.4. Controls were 50 mM MES buffer, 150 mM NaCl pH 5.3; rHuPH20 alone pH 5.3; and cathepsin-L at pH 7.4. Full thickness biopsies were harvested at 2 hours, 24 hours and seven days post treatment and fixed in Bouin's fixative. Six mm histological sections were cut and stained with Hematoxylin and Eosin or with Mason Trichrome collagen stain. Gross changes characterized by intense brown discoloration were observed in the collagenase injected sites, but to a much lesser degree in the cathepsin-L treated site. No gross changes were seen at the sites injected with the controls or in the untreated skin. These results show that treatment with cathepsin-L is accompanied with minimal bleeding compared to bacterial collagenase injection.

[0625] Gross changes typically correlated with histological findings of substantial subcutaneous injection site bleeding with collagenase, but minimal bleeding with cathepsin-L. The micro-architecture of fibrous septae was characterized by longitudinal splitting, disintegration and angulation of the collagen fibers in the skin injected with cathepsin-L and bacterial collagenase, compared to the densely packed collagen septae in the MES buffer only treated skin. The histology results, however, did show a more severe change in the micro architecture of the septae in the collagenase-treated site compared to the cathepsin-L treated site, consistent with the hemorrhage results. In addition, treatment with doses of bacterial collagenase as low as 5 μg/mL resulted in serious rhabdomyolysis. These results demonstrate that while cathepsin-L degrades collagen and alters the structure of the fibrous septae, its effects are more controlled then bacterial collagenase because cathepsin-L is rapidly inactivated at physiological pH whereas collagenase is active for a prolonged period of time at physiological pH.

[0626] In another study, pigs received 5 mL of 120/ml U rHuPH20 at pH 5.3 followed by 5 mL of recombinant cathepsin-L in doses ranging from 5 to 1000 μg/mL (5, 25, 50, 100, 200, 500, and 1000 μg/mL) in 50 mM MES, 150 mM NaCl, pH 5.3. Full thickness skin biopsies were harvested at 2 and 24 hr post treatment, fixed in Bouin's fixative and processed for H&E or with Masson's Trichrome for collagen stain as described in Example 5. Visual examination of the skin excised 2 hours and 24 hours after injection showed that there was a moderate bleeding at the injection site treated with doses of 25 μg/mL and above. Rhamdomyolysis was observed only in the injection sites area at the high doses of 500 μg/mL and 1000 μg/mL of recombinant cathepsin-L.

### Example 25

### Effect of Reducing Conditions on Enzymatic Activity of Cathepsin-L for a Fluorogenic Substrate

[0627] The effect of reducing agents on the enzymatic activity of cathepsin-L was assayed using a custom manufactured fluorogenic substrate, designated Z-His-Arg-Tyr-Arg-AMC (SEQ ID NO: 536; Z=:N-carbobenzyloxy; AMC: 7-Amino-4-Methyl Coumarin) (Biomatik Corp., Wilmington, Del.). Cathepsin-L activity in RFU/Sec was determined in the presence of cysteine (Spectrum Chemical, Gardena, Calif.; Catalog #C1473) or TCEP (tris (2-carboxyethyl)phosphine) (Sigma Aldrich, St. Louis, Mo. Cat#C4706).

[0628] Activatated cathepsin-L at a stock concentration of 7.85 mg/mL containing 5 mM Cysteine was used. 2 ng/ml cathepsin-L was incubated with 20 μM fluorogenic peptide substrate Z-His-Arg-Tyr-Arg-AMC at 37° C. for 30 minutes at 37° C. in a total volume of 200 μl 50 mM Sodium Citrate buffer pH 6.5, 2% DMSO, 0.01% Brij-35 containing the appropriate concentration of cysteine or TCEP as indicated in Table 19A. Incubations were performed in an opaque-bottom microplate. The resulting fluorescence was read at the optimum excitation emission 360 nm-460 nm for the substrate in a fluorescent plate reader (Molecular Devices, Spectramax M5, Sunnyvale, Calif.). After sigrnoidal dose response fits in Graphpad Prizm software (Graphpad Software, La Jolla, Calif.), the curve fits had R2 values >0.998. The results shown in Table 19A below indicate that the presence of a reducing agent increases the activity of cathepsin-L

TABLE 19A
Effect of Reducing Agents on Cathepsin-L activity

| | Activity | % Max |
|---|---|---|
| | RFU/Second | Activity |
| μM Reductant | | |
| (Cysteine) | | |
| 10000 | 413.577 | 99.7% |
| 3333 | 414.853 | 100.0% |
| 1111 | 303.383 | 73.1% |
| 370 | 101.905 | 24.6% |
| 123 | 17.821 | 4.3% |
| 41 | 3.310 | 0.8% |
| 14 | 1.384 | 0.3% |
| μM Reductant | | |
| (TCEP) | | |
| 10000 | 358.5 | 88.4% |
| 3333 | 405.4 | 100.0% |
| 1111 | 399.5 | 98.5% |
| 370 | 385.1 | 95.0% |
| 123 | 388.9 | 95.9% |
| 41 | 331.9 | 81.9% |
| 14 | 172.1 | 42.5% |
| 4.6 | 26.7 | 6.6% |
| 1.5 | 0.7 | 0.2% |

### Example 26

### Enzymatic Activity of Cathepsin-L on Substrates

[0629] Cathepsin-L at a concentration of 0.25 mg/ml was incubated with either one of the following three proteins (Collagen Type I at 0.5 mg/ml; HSA at 0.25 mg/ml; and PH20 at 0.25 mg/ml) or as a mixture of two or three at 37° C. for up to 16 hours in a buffer containing either 50 mM sodium acetate pH 5, 50 mM sodium acetate pH 6 or 50 mM Hepes pH 7. At various time points (0, 15 min, 30 min, 60 min, 120 min, 240 min, and overnight), aliquots of samples were taken and analyzed by SDS-PAGE using blue staining. Protein degradation by cathepsin-L was dose-dependent and was observed for each of the substrates tested by a visual decrease in the intensity of the intact protein. Degradation of collagen Type I, HAS and PH20 by cathepsin L was more complet at pH 5. The degradation diminished at pH 6 and above. At neutral pH, the degradation of collagen Type I, HAS and PH20 by cathepsin L was minimal. Since cathepsin L is stable at pH 5, adding a reducing agent to the buffer had little or no effect on the degradation of collagen, HAS and PH20 by cathepsin L at pH 5. Since cathepsin L undergoes autocatalysis as the pH is increased to neutral, adding a reducing agent at neutral pH decreased the autocatalysis of cathepin L and thereby increased the degradation of collagen, HAS and PH20.

### Example 27

### Cloning and Expression of hMMP-1

[0630] A. Cloning and High-Throughput Expression of hMMP-1 Library

[0631] In this example, a human matrix metalloprotease 1 (hMMP-1) library was created by cloning DNA encoding human MMP-1 into a plasmid followed by transformation and protein growth/isolation. The library was created by introducing mutations in a parent human MMP-1 DNA sequence having the sequence of nucleotides set forth in SEQ ID NO: 534, which encodes the inactive zymogen proMMP-1 (set forth in SEQ ID NO: 327), to generate single amino acid variants of MMP-1 across the catalytic domain and proline rich linker domain of the polypeptide. The hMMP-1 library was designed to contain at least 15 amino acid variants at each of 178 amino acids positions within the catalytic domain (amino acids 81-242 of SEQ ID NO: 327) and the linker region (amino acids 243-258 of SEQ ID NO: 327) of human MMP-1 (See Table 20, below).

TABLE 20
hMMP-1 Library

| Amino | |
|---|---|
| Acid | Amino Acid Substitutions |
| F81 | E; H; R; C; Q; T; S; G; M; W; I; V; L; A; P |
| V82 | R; C; N; Q; T; Y; S; G; F; M; W; I; L; A; P |
| L83 | D; E; H; R; C; Q; T; Y; S; G; M; W; I; A; P |
| T84 | D; E; H; R; C; Q; Y; S; G; F; I; V; L; A; P |
| E85 | K; R; C; N; Q; T; Y; S; G; F; M; V; L; A; P |
| G86 | D; H; K; C; N; T; Y; S; F; M; W; I; V; L; P |
| N87 | E; H; R; C; Q; Y; S; G; F; M; I; V; L; A; P |
| P88 | D; E; H; K; R; C; Q; T; Y; G; W; I; V; L; A |
| R89 | E; H; K; N; T; Y; S; G; F; M; W; V; L; A; P |
| W90 | E; H; R; N; Q; T; S; G; F; M; I; V; L; A; P |
| E91 | D; H; R; C; N; T; Y; S; G; F; W; I; V; L; A |
| Q92 | E; K; R; N; T; Y; S; G; F; W; I; V; L; A; P |
| T93 | D; E; K; R; N; S; G; F; M; W; I; V; L; A; P |
| H94 | D; E; R; N; T; S; G; F; M; W; I; V; L; A; P |
| L95 | D; E; H; K; R; C; T; Y; S; G; W; I; V; A; P |
| T96 | E; H; R; C; N; Q; S; G; F; W; I; V; L; A; P |
| Y97 | D; E; H; K; R; N; Q; T; S; G; W; V; L; A; P |
| R98 | D; E; H; K; C; Y; S; G; F; M; W; V; L; A; P |
| I99 | E; H; R; C; N; Q; T; Y; S; G; F; W; V; L; A; |
| | P |
| E100 | D; H; R; N; T; Y; S; G; F; M; W; I; V; L; P |
| N101 | D; H; K; R; C; T; Y; S; F; M; W; V; L; A; P |
| Y102 | D; E; K; R; C; N; Q; S; G; F; M; V; L; A; P |
| T103 | D; E; K; R; C; N; Q; Y; S; G; W; V; L; A; P |
| P104 | D; E; H; R; C; Q; T; Y; S; G; F; M; V; L; A |
| D105 | E; R; C; N; T; S; G; F; M; W; I; V; L; A; P |
| L106 | D; H; R; C; N; T; Y; S; G; F; M; I; V; A; P |
| P107 | D; K; R; C; T; Y; S; G; F; M; W; I; V; L; A |
| R108 | E; K; C; N; T; Y; S; G; F; W; I; V; L; A; P |
| A109 | D; E; H; R; N; Q; T; Y; S; G; M; W; I; V; L; |
| D110 | H; R; C; Q; T; Y; S; G; F; M; I; V; L; A; P |
| V111 | D; E; K; R; C; Q; T; Y; S; G; W; I; L; A; P |
| D112 | H; K; R; C; Q; T; Y; S; G; F; M; W; I; V; L; |
| | A; P |
| H113 | D; E; R; N; T; Y; S; G; F; M; W; V; L; A; P |
| A114 | E; R; C; N; Q; T; S; G; F; M; W; I; V; L; P |
| I115 | D; E; H; K; R; C; Q; T; S; G; F; W; V; L; P |
| E116 | D; H; K; R; C; N; Q; S; G; F; M; I; L; A; P |
| K117 | D; E; H; R; N; Q; T; Y; S; G; F; W; L; A; P |
| A118 | D; E; H; K; R; Q; T; S; G; F; W; I; V; L; P |
| F119 | E; H; K; R; C; N; T; Y; S; G; W; V; L; A; P |
| Q120 | D; E; H; K; R; C; N; T; Y; G; M; W; V; A; P |
| L121 | E; H; K; R; C; N; Q; T; S; G; F; I; V; A; P |
| W122 | E; H; K; R; N; Q; T; Y; S; G; F; V; L; A; P |
| S123 | D; H; K; R; C; N; Q; T; Y; G; F; M; W; I; V; |
| | L; A; P |
| N124 | D; K; R; C; T; S; G; F; M; W; I; V; L; A; P |
| V125 | D; E; H; R; C; Q; T; Y; S; G; F; M; W; A; P |
| T126 | E; H; K; R; N; Q; S; G; F; M; W; V; L; A; P |
| P127 | E; H; K; R; C; Q; T; S; F; M; W; I; V; L; A |
| L128 | D; K; R; C; Q; T; S; G; F; M; W; I; V; A; P |
| T129 | E; H; K; R; C; Y; S; G; F; M; I; V; L; A; P |
| F130 | E; H; K; R; C; N; T; Y; S; G; I; V; L; A; P |
| T131 | D; E; H; R; C; Q; Y; S; G; F; M; I; L; A; P |
| K132 | D; E; H; R; T; Y; S; G; F; M; I; V; L; A; P |
| V133 | D; E; H; K; R; C; N; T; S; G; M; W; L; A; P |
| S134 | D; E; H; K; R; C; N; Q; T; Y; G; V; L; A; P |
| E135 | D; H; R; N; Q; T; S; F; M; W; I; V; L; A; P |
| G136 | D; E; H; R; C; N; T; S; M; W; I; V; L; A; P |
| Q137 | E; H; K; R; C; N; T; Y; S; G; F; W; L; A; P |
| A138 | D; E; H; R; C; Q; T; S; G; M; W; I; V; L; P |
| D139 | E; H; R; C; N; Y; S; G; F; M; W; I; V; L; A; |
| | P |
| I140 | D; E; H; K; R; C; T; Y; G; F; M; W; V; L; A |
| M141 | D; E; H; R; C; N; T; Y; S; G; W; I; L; A; P |
| I142 | K; R; N; Q; T; Y; S; G; F; M; W; V; L; A; P |
| S143 | E; H; R; C; N; Q; T; Y; G; M; W; I; L; A; P |
| F144 | E; H; K; R; C; N; Q; T; S; G; M; W; V; L; P |
| V145 | D; E; H; K; R; C; N; Q; T; S; G; W; L; A; P |
| R146 | D; E; H; K; C; N; Q; T; Y; S; F; V; L; A; P |
| G147 | E; H; R; C; Q; T; S; F; M; W; I; V; L; A; P |
| D148 | E; K; R; C; N; T; S; G; M; W; I; V; L; A; P |
| H149 | E; R; C; N; Q; T; Y; S; G; W; I; V; L; A; P |
| R150 | D; E; H; K; N; T; S; G; M; W; I; V; L; A; P |
| D151 | K; R; N; Q; T; Y; S; G; F; M; W; V; L; A; P |
| N152 | D; H; K; R; C; T; Y; S; G; F; W; I; L; A; P |
| S153 | D; H; K; R; C; Q; T; Y; G; F; I; V; L; A; P |
| P154 | H; K; R; C; N; Q; T; Y; S; F; W; I; V; L; A |
| F155 | E; H; R; N; Q; T; Y; S; G; M; W; V; L; A; P |
| D156 | E; H; K; R; C; T; Y; S; G; M; W; V; L; A; P |
| G157 | D; H; K; R; N; Q; T; Y; S; F; M; V; L; A; P |
| P158 | D; K; R; C; N; Q; T; Y; S; G; F; W; I; V; L; |
| | A |
| G159 | E; K; R; C; Q; T; Y; S; M; W; I; V; L; A; P |
| G160 | E; H; R; C; N; Q; T; S; M; W; I; V; L; A; P |
| N161 | E; H; R; C; Q; T; Y; S; G; F; W; I; V; L; P |
| L162 | D; E; R; C; Q; T; Y; S; G; F; M; W; I; A; P |
| A163 | E; K; R; C; N; Q; T; Y; S; G; F; I; V; L; P |
| H164 | E; K; R; C; N; Q; Y; S; G; F; M; V; L; A; P |
| A165 | D; H; K; R; N; Q; T; S; G; F; M; W; V; L; P |
| F166 | E; H; K; R; C; N; S; G; M; W; I; V; L; A; P |
| Q167 | D; E; K; R; N; T; Y; S; G; F; M; V; L; A; P |
| P168 | D; H; R; C; N; T; S; G; F; M; W; I; V; L; A |
| G169 | D; E; H; R; C; Q; T; S; M; W; I; V; L; A; P |
| P170 | D; H; K; R; C; Q; T; S; G; F; M; W; I; L; A |
| G171 | D; E; H; K; R; C; N; Q; Y; S; M; W; L; A; P |
| I172 | D; E; R; C; N; Q; T; Y; G; M; W; V; L; A; P |
| G173 | D; K; R; C; N; T; Y; S; F; M; W; V; L; A; P |
| G174 | D; E; H; R; N; T; Y; S; F; M; W; V; L; A; P |
| D175 | E; H; R; C; N; Q; T; Y; S; G; F; I; V; L; A; |
| | P |
| A176 | D; E; K; R; C; N; Q; T; S; G; F; W; V; L; P |
| H177 | D; R; C; N; Q; T; Y; S; G; W; I; V; L; A; P |
| F178 | E; H; K; R; C; Q; T; Y; S; G; W; I; V; L; A; |
| | P |
| D179 | E; K; R; C; N; Q; T; S; G; W; I; V; L; A; P |
| E180 | D; K; R; C; N; Q; T; Y; S; G; F; M; I; A; P |
| D181 | E; K; R; C; Q; T; Y; S; G; F; M; V; L; A; P |
| E182 | D; R; C; Q; T; Y; S; G; F; M; W; I; L; A; P |
| R183 | E; H; K; C; N; T; S; G; M; W; I; V; L; A; P |
| W184 | E; H; R; N; Q; T; S; G; F; M; I; V; L; A; P |
| T185 | D; E; H; R; C; N; Q; Y; S; G; W; V; L; A; P |
| N186 | D; E; H; R; C; Q; T; Y; S; G; F; V; L; A; P |
| N187 | D; H; K; R; C; T; S; G; F; M; W; I; L; A; P |
| F188 | D; E; H; K; R; N; Q; S; G; W; I; V; L; A; P |
| R189 | D; E; H; K; C; N; Q; T; Y; G; W; V; L; A; P |
| E190 | D; H; K; R; C; T; Y; S; G; M; I; V; L; A; P |
| Y191 | D; E; H; K; R; C; Q; T; S; G; W; V; L; A; P |
| N192 | D; H; K; R; C; Q; T; S; G; M; W; V; L; A; P |
| L193 | D; E; K; R; N; Q; T; Y; S; G; F; W; I; A; P |
| H194 | E; K; Q; T; Y; S; G; F; M; W; I; V; L; A; P |
| R195 | D; E; K; C; Q; T; Y; S; G; F; W; V; L; A; P |
| V196 | D; E; H; K; R; Q; T; Y; S; G; M; I; L; A; P |
| A197 | E; H; R; C; N; Q; T; Y; S; G; W; I; V; L; P |
| A198 | D; E; H; K; R; T; Y; S; G; F; M; W; V; L; P |
| H199 | E; K; R; C; N; T; S; G; M; W; I; V; L; A; P |
| E200 | D; R; C; N; T; Y; S; G; F; M; W; I; V; A; P |
| L201 | D; E; K; R; N; Q; T; S; G; M; W; I; V; A; P |
| G202 | D; E; H; K; R; C; T; Y; S; M; I; V; L; A; P |
| H203 | D; E; R; C; N; Q; T; Y; S; G; I; V; L; A; P |
| S204 | D; H; K; R; N; Q; T; Y; G; W; I; V; L; A; P |
| L205 | D; E; R; C; N; Q; T; S; G; M; W; I; V; A; P |
| G206 | D; E; H; R; C; Q; T; S; M; W; I; V; L; A; P |
| L207 | D; H; K; R; N; Q; Y; S; G; M; W; I; V; A; P |
| S208 | D; E; K; R; C; N; Q; T; G; F; W; V; L; A; P |
| H209 | D; R; C; N; Q; T; Y; S; G; F; W; V; L; A; P |
| S210 | H; K; R; C; N; Q; T; G; F; W; I; V; L; A; P |
| T211 | D; H; K; R; N; Q; S; G; F; M; W; V; L; A; P |
| D212 | E; H; K; R; N; Q; T; Y; S; G; F; V; L; A; P |
| I213 | D; E; H; K; R; C; N; Q; T; S; G; F; M; V; L; |
| | A; P |
| G214 | D; E; R; C; Q; T; Y; S; F; M; I; V; L; A; P |
| A215 | D; H; K; R; C; N; Q; T; S; G; M; W; I; V; L; |
| | P |
| L216 | D; E; K; R; C; Q; T; S; G; M; W; I; V; A; P |
| M217 | D; H; K; R; C; N; Q; T; Y; S; G; I; L; A; P |
| Y218 | D; E; R; C; N; Q; S; C; F; W; I; V; L; A; P |
| P219 | D; E; H; K; R; C; Q; T; S; G; F; W; V; L; A |
| S220 | E; H; K; R; N; Q; T; G; F; M; I; V; L; A; P |
| Y221 | E; K; R; C; N; Q; T; S; G; M; W; V; L; A; P |
| T222 | D; H; R; C; N; Y; S; G; F; M; W; I; V; L; A; |
| | P |
| F223 | E; H; K; R; C; N; Q; T; Y; S; G; M; L; A; P |
| S224 | D; H; K; R; C; Q; T; G; M; W; I; V; L; A; P |
| G225 | D; E; H; K; R; C; N; Q; T; S; M; W; V; A; P |
| D226 | E; H; R; C; N; T; S; G; M; W; I; V; L; A; P |
| V227 | D; E; H; K; R; C; Q; T; Y; S; G; W; L; A; P |
| Q228 | D; E; H; K; R; N; T; Y; S; G; M; W; L; A; P |
| L229 | D; E; H; R; C; Q; T; Y; G; M; W; I; V; A; P |
| A230 | D; H; R; C; N; T; Y; S; G; M; W; I; V; L; P |
| Q231 | D; H; R; C; Y; S; G; F; M; W; I; V; L; A; P |
| D232 | E; H; K; R; N; Q; T; Y; S; G; F; W; V; L; P |
| D233 | E; K; R; N; Q; T; S; G; M; W; I; V; L; A; P |
| I234 | D; E; H; C; N; Q; T; Y; G; M; W; V; L; A; P |
| D235 | E; H; R; C; N; Q; T; Y; S; G; I; V; L; A; P |
| G236 | D; E; K; R; C; N; T; Y; S; F; M; I; V; L; P |
| I237 | D; E; K; R; C; N; Q; T; Y; S; G; W; L; A; P |
| Q238 | E; H; K; R; C; N; T; Y; S; G; F; W; I; L; P |
| A239 | D; H; K; R; C; Q; T; Y; S; G; F; W; I; V; L; |
| | P |
| I240 | D; K; R; C; Q; T; Y; S; G; F; M; V; L; A; P |
| Y241 | D; H; R; N; Q; T; S; G; M; W; I; V; L; A; P |
| G242 | E; H; K; R; N; T; Y; S; F; W; I; V; L; A; P |
| R243 | D; H; K; C; N; Q; T; Y; S; G; I; V; L; A; P |
| S244 | D; E; H; R; Q; T; Y; G; F; M; W; V; L; A; P |
| Q245 | E; H; K; R; C; T; S; G; F; M; W; I; V; L; P |
| N246 | D; K; R; C; Q; T; Y; S; G; F; W; I; V; L; A; |
| | P |
| P247 | D; E; H; K; R; N; Q; T; S; G; F; I; V; L; A |
| V248 | E; H; K; R; C; Q; T; Y; S; G; F; M; W; I; L; |
| | A |
| Q249 | E; H; K; R; C; N; T; Y; G; W; I; V; L; A; P |
| P250 | D; K; R; N; Q; T; Y; S; G; F; M; W; V; L; A |
| I251 | D; E; K; R; C; Q; T; Y; S; G; W; V; L; A; P |
| G252 | D; E; H; K; R; C; T; S; F; M; W; I; V; L; A; |
| | P |
| P253 | E; K; R; C; N; Q; T; Y; G; M; W; I; V; L; A |
| Q254 | D; E; R; C; T; Y; S; G; F; W; I; V; L; A; P |
| T255 | E; H; K; R; C; N; Q; S; G; F; I; V; L; A; P |
| P256 | E; K; R; C; N; Q; Y; S; G; F; M; I; V; L; A |
| K257 | E; R; C; N; T; S; G; F; M; W; I; V; L; A; P |
| A258 | D; E; R; N; Q; T; Y; G; F; M; W; I; V; L; P |

[0632] The cDNA encoding each individual hMMP-1 mutant was generated by changing the wild type codon, encoding each of the 178 amino acids positions identified in Table 21 below, to a codon encoding the desired amino acid substitution. The wild type codons are set forth in SEQ ID NO:534. SEQ ID NO: 534 also depicts the encoded amino acids. The amino acids substitutions and corresponding mutated codons are listed in Table 21, below.

TABLE 21
Codons encoding each amino acid substitution

| | | | | | | | |
|---|---|---|---|---|---|---|---|
| Mutation | Codon | Mutation | Codon | Mutation | Codon | Mutation | Codon |

| | | | | | | | |
|---|---|---|---|---|---|---|---|
| F81C | TGT | T84L | TTG | N87S | AGT | W90H | CAT |
| F81E | GAG | T84D | GAT | N87I | ATT | W90M | ATG |
| F81I | ATT | T84R | CGG | N87C | TGT | W90R | CGG |
| F81L | CTG | T84I | ATT | N87A | GCG | W90E | GAG |
| F81P | CCT | T84S | TCT | N87G | GGT | W90N | AAT |
| F81S | TCT | T84G | GGT | N87Y | TAT | W90Q | CAG |
| F81A | GCG | T84Q | CAG | N87E | GAG | E91N | AAT |
| F81M | ATG | T84P | CCT | N87H | CAT | E91R | CGG |
| F81G | GGG | T84A | GCG | N87Q | CAG | E91W | TGG |
| F81T | ACG | T84C | TGT | P88C | TGT | E91G | GGG |
| F81Q | CAG | T84Y | TAT | P88K | AAG | E91V | GTG |
| F81R | CGT | T84F | TTT | P88W | TGG | E91Y | TAT |
| F81W | TGG | E85L | CTG | P88G | GGG | E91C | TGT |
| F81H | CAT | E85Q | CAG | P88L | CTG | E91H | CAT |
| F81V | GTG | E85P | CCT | P88Q | CAG | E91T | ACG |
| V82I | ATT | E85T | ACT | P88A | GCG | E91S | AGT |
| V82C | TGT | E85K | AAG | P88T | ACG | E91A | GCG |
| V82A | GCG | E85M | ATG | P88Y | TAT | E91I | ATT |
| V82P | CCG | E85G | GGT | P88R | CGG | E91D | GAT |
| V82Y | TAT | E85R | CGT | P88H | CAT | E91F | TTT |
| V82M | ATG | E85S | TCT | P88I | ATT | E91L | TTG |
| V82Q | CAG | E85C | TGT | P88V | GTG | Q92V | GTT |
| V82F | TTT | E85Y | TAT | P88E | GAG | Q92Y | TAT |
| V82W | TGG | E85A | GCG | P88D | GAT | Q92L | CTG |
| V82N | AAT | E85N | AAT | R89V | GTG | Q92N | AAT |
| V82R | CGT | E85V | GTG | R89W | TGG | Q92E | GAG |
| V82G | GGT | E85F | TTT | R89M | ATG | Q92I | ATT |
| V82S | TCG | G86L | CTT | R89A | GCG | Q92T | ACT |
| V82L | TTG | G86P | CCG | R89T | ACG | Q92G | GGT |
| V82T | ACT | G86I | ATT | R89G | GGG | Q92P | CCG |
| L83A | GCG | G86T | ACT | R89S | TCT | Q92W | TGG |
| L83C | TGT | G86H | CAT | R89K | AAG | Q92F | TTT |
| L83D | GAT | G86D | GAT | R89F | TTT | Q92S | TCG |
| L83E | GAG | G86N | AAT | R89Y | TAT | Q92R | CGG |
| L83G | GGT | G86S | AGT | R89N | AAT | Q92K | AAG |
| L83H | CAT | G86K | AAG | R89H | CAT | Q92A | GCT |
| L83I | ATT | G86W | TGG | R89L | TTG | T93A | GCG |
| L83M | ATG | G86Y | TAT | R89E | GAG | T93L | CTT |
| L83P | CCG | G86V | GTT | R89P | CCT | T93M | ATG |
| L83Q | CAG | G86C | TGT | W90L | TTG | T93N | AAT |
| L83R | CGG | G86M | ATG | W90G | GGG | T93V | GTG |
| L83S | AGT | G86F | TTT | W90P | CCG | T93I | ATT |
| L83T | ACG | N87M | ATG | W90T | ACT | T93D | GAT |
| L83W | TGG | N87L | CTG | W90S | TCG | T93S | TCG |
| L83Y | TAT | N87P | CCG | W90V | GTG | T93R | CGG |
| T84V | GTT | N87V | GTT | W90I | ATT | T93W | TGG |
| T84E | GAG | N87R | CGT | W90A | GCT | T93F | TTT |
| T84H | CAT | N87F | TTT | W90F | TTT | T93P | CCT |
| T93G | GGG | Y97R | CGT | E100L | CTG | T103R | CGG |
| T93K | AAG | Y97V | GTG | E100H | CAT | T103Y | TAT |
| T93E | GAG | Y97A | GCT | E100D | GAT | T103N | AAT |
| H94L | CTG | Y97P | CCT | E100M | ATG | T103C | TGT |
| H94S | TCG | Y97L | CTT | E100G | GGT | T103Q | CAG |
| H94M | ATG | Y97T | ACG | E100W | TGG | T103W | TGG |
| H94R | CGG | Y97K | AAG | E100Y | TAT | T103P | CCG |
| H94E | GAG | Y97W | TGG | E100R | CGT | T103A | GCG |
| H94I | ATT | Y97H | CAT | E100S | TCT | T103G | GGG |
| H94D | GAT | Y97S | TCG | E100T | ACG | T103K | AAG |
| H94P | CCG | Y97E | GAG | E100F | TTT | P104G | GGG |
| H94A | GCG | Y97D | GAT | E100I | ATT | P104E | GAG |
| H94N | AAT | Y97N | AAT | E100N | AAT | P104T | ACT |
| H94F | TTT | Y97G | GGT | N101M | ATG | P104F | TTT |
| H94G | GGG | Y97Q | CAG | N101F | TTT | P104R | CGT |
| H94T | ACT | R98H | CAT | N101L | TTG | P104D | GAT |
| H94V | GTG | R98K | AAG | N101V | GTG | P104C | TGT |
| H94W | TGG | R98C | TGT | N101H | CAT | P104Q | CAG |
| L95E | GAG | R98L | CTG | N101R | CGG | P104V | GTG |
| L95Y | TAT | R98M | ATG | N101C | TGT | P104Y | TAT |
| L95R | CGG | R98F | TTT | N101T | ACT | P104H | CAT |
| L95A | GCT | R98W | TGG | N101P | CCT | P104L | TTG |
| L95G | GGG | R98Y | TAT | N101W | TGG | P104S | TCG |
| L95K | AAG | R98P | CCT | N101K | AAG | P104A | GCG |
| L95S | AGT | R98E | GAG | N101S | TCG | P104M | ATG |
| L95T | ACG | R98A | GCG | N101D | GAT | D105A | GCT |
| L95H | CAT | R98G | GGG | N101A | GCG | D105C | TGT |
| L95W | TGG | R98V | GTT | N101Y | TAT | D105F | TTT |
| L95V | GTG | R98S | TCG | Y102R | CGT | D105G | GGT |
| L95C | TGT | R98D | GAT | Y102K | AAG | D105I | ATT |
| L95P | CCT | I99C | TGT | Y102V | GTG | D105L | CTG |
| L95D | GAT | I99E | GAG | Y102M | ATG | D105M | ATG |
| L95I | ATT | I99G | GGG | Y102P | CCG | D105N | AAT |
| T96E | GAG | I99H | CAT | Y102N | AAT | D105P | CCT |
| T96R | CGG | I99N | AAT | Y102G | GGG | D105R | CGG |
| T96P | CCG | I99P | CCT | Y102L | CTG | D105S | TCG |
| T96S | TCG | I99T | ACG | Y102D | GAT | D105T | ACG |
| T96A | GCG | I99V | GTT | Y102S | TCG | D105V | GTT |
| T96L | TTG | I99A | GCG | Y102F | TTT | D105W | TGG |
| T96W | TGG | I99F | TTT | Y102A | GCT | D105E | GAG |
| T96N | AAT | I99L | CTG | Y102E | GAG | L106P | CCG |
| T96G | GGT | I99R | CGT | Y102Q | CAG | L106D | GAT |
| T96F | TTT | I99S | TCG | Y102C | TGT | L106N | AAT |
| T96Q | CAG | I99Q | CAG | T103E | GAG | L106G | GGT |
| T96H | CAT | I99W | TGG | T103D | GAT | L106M | ATG |
| T96V | GTT | I99Y | TAT | T103S | AGT | L106A | GCT |
| T96I | ATT | E100V | GTT | T103L | CTG | L106R | CGG |
| T96C | TGT | E100P | CCG | T103V | GTT | L106Y | TAT |
| L106T | ACG | A109V | GTT | D112I | ATT | E116A | GCG |
| L106V | GTG | A109E | GAG | D112Y | TAT | E116C | TGT |
| L106H | CAT | A109L | CTT | D112L | TTG | E116D | GAT |
| L106F | TTT | A109H | CAT | H113T | ACT | E116F | TTG |
| L106I | ATT | D110P | CCT | H113L | CTG | E116G | GGT |
| L106C | TGT | D110F | TTT | H113M | ATG | E116H | CAT |
| L106S | TCT | D110Q | CAG | H113S | TCG | E116I | ATT |
| P107L | TTG | D110R | CGG | H113N | AAT | E116K | AAG |
| P107W | TGG | D110M | ATG | H113R | AGG | E116L | CTG |
| P107T | ACT | D110H | CAT | H113A | GCT | E116M | ATG |
| P107S | TCG | D110I | ATT | H113E | GAG | E116N | AAT |
| P107R | CGG | D110L | CTT | H113V | GTG | E116P | CCG |
| P107Y | TAT | D110V | GTG | H113Y | TAT | E116Q | CAG |
| P107M | ATG | D110T | ACG | H113F | TTT | E116R | AGG |
| P107V | GTG | D110S | TCG | H113D | GAT | E116S | TCT |
| P107D | GAT | D110Y | TAT | H113W | TGG | K117H | CAT |
| P107A | GCG | D110G | GGT | H113G | GGG | K117T | ACG |
| P107C | TGT | D110C | TGT | H113P | CCG | K117Q | CAG |
| P107K | AAG | D110A | GCG | A114E | GAG | K117E | GAG |
| P107F | TTT | V111E | GAG | A114S | TCG | K117A | GCG |
| P107I | ATT | V111A | GCT | A114I | ATT | K117F | TTT |
| P107G | GGT | V111S | TCT | A114P | CCT | K117D | GAT |
| R108P | CCT | V111W | TGG | A114N | AAT | K117N | AAT |
| R108G | GGT | V111G | GGT | A114L | CTT | K117G | GGT |
| R108T | ACG | V111Y | TAT | A114T | ACT | K117W | TGG |
| R108E | GAG | V111P | CCG | A114F | TTT | K117Y | TAT |
| R108A | GCG | V111L | CTG | A114V | GTT | K117L | TTG |
| R108Y | TAT | V111D | GAT | A114G | GGT | K117S | AGT |
| R108K | AAG | V111K | AAG | A114C | TGT | K117P | CCG |
| R108C | TGT | V111T | ACT | A114M | ATG | K117R | AGG |
| R108S | TCT | V111Q | CAG | A114R | AGG | A118G | GGG |
| R108F | TTT | V111I | ATT | A114W | TGG | A118R | CGT |
| R108W | TGG | V111C | TGT | A114Q | CAG | A118W | TGG |
| R108I | ATT | V111R | CGT | I115F | TTT | A118K | AAG |
| R108L | CTT | D112A | GCG | I115T | ACT | A118P | CCT |
| R108N | AAT | D112M | ATG | I115H | CAT | A118V | GTG |
| R108V | GTT | D112V | GTT | I115G | GGT | A118L | TTG |
| A109S | TCG | D112R | CGG | I115K | AAG | A118D | GAT |
| A109R | CGG | D112K | AAG | I115E | GAG | A118S | AGT |
| A109T | ACG | D112P | CCT | I115S | AGT | A118F | TTT |
| A109W | TGG | D112Q | CAG | I115P | CCT | A118I | ATT |
| A109I | ATT | D112F | TTT | I115C | TGT | A118H | CAT |
| A109Q | CAG | D112G | GGG | I115L | CTT | A118E | GAG |
| A109N | AAT | D112C | TGT | I115Q | CAG | A118Q | CAG |
| A109Y | TAT | D112W | TGG | I115R | CGG | A118T | ACT |
| A109G | GGG | D112T | ACT | I115W | TGG | F119G | GGG |
| A109M | ATG | D112H | CAT | I115V | GTT | F119T | ACT |
| A109D | GAT | D112S | TCT | I115D | GAT | F119R | CGG |
| F119L | TTG | W122G | GGG | V125T | ACG | L128A | GCG |
| F119N | AAT | W122S | TCG | V125A | GCT | L128D | GAT |
| F119S | AGT | W122V | GTT | V125C | TGT | L128V | GTG |
| F119C | TGT | W122H | CAT | V125D | GAT | L128W | TGG |
| F119P | CCG | W122F | TTT | V125W | TGG | L128C | TGT |
| F119W | TGG | W122Y | TAT | V125R | CGG | L128K | AAG |
| F119K | AAG | W122K | AAG | V125E | GAA | T129G | GGT |
| F119H | CAT | W122Q | CAG | V125F | TTT | T129A | GCT |
| F119A | GCG | W122E | GAG | V125H | CAT | T129C | TGT |
| F119V | GTT | S123D | GAT | T126K | AAG | T129K | AAG |
| F119Y | TAT | S123L | TTG | T126V | GTG | T129F | TTT |
| F119E | GAG | S123A | GCT | T126G | GGG | T129Y | TAT |
| Q120K | AAG | S123C | TGT | T126R | CGG | T129S | TCG |
| Q120N | AAT | S123I | ATT | T126L | TTG | T129R | CGG |
| Q120A | GCG | S123K | AAG | T126H | CAT | T129V | GTT |
| Q120V | GTG | S123N | AAT | T126M | ATG | T129L | CTT |
| Q120D | GAT | S123F | TTT | T126P | CCG | T129H | CAT |
| Q120R | CGG | S123Y | TAT | T126A | GCG | T129P | CCT |
| Q120P | CCT | S123M | ATG | T126N | AAT | T129E | GAG |
| Q120W | TGG | S123H | CAT | T126E | GAG | T129I | ATT |
| Q120Y | TAT | S123R | CGG | T126F | TTT | T129M | ATG |
| Q120C | TGT | S123W | TGG | T126W | TGG | F130L | CTG |
| Q120H | CAT | S123T | ACG | T126Q | CAG | F130P | CCT |
| Q120T | ACT | S123P | CCT | T126S | AGT | F130C | TGT |
| Q120M | ATG | S123G | GGG | P127C | TGT | F130R | CGG |
| Q120E | GAG | S123Q | CAG | P127F | TTT | F130Y | TAT |
| Q120G | GGT | S123V | GTT | P127T | ACG | F130H | CAT |
| L121E | GAG | N124G | GGT | P127E | GAG | F130I | ATT |
| L121Q | CAG | N124C | TGT | P127W | TGG | F130V | GTT |
| L121P | CCT | N124V | GTG | P127A | GCT | F130K | AAG |
| L121R | CGG | N124L | CTT | P127S | AGT | F130T | ACT |
| L121C | TGT | N124T | ACG | P127H | CAT | F130E | GAG |
| L121G | GGG | N124R | CGT | P127Q | CAG | F130A | GCG |
| L121K | AAG | N124M | ATG | P127K | AAG | F130N | AAT |
| L121F | TTT | N124S | TCG | P127R | CGG | F130G | GGT |
| L121I | ATT | N124P | CCT | P127I | ATT | F130S | AGT |
| L121S | TCG | N124A | GCG | P127V | GTG | T131F | TTT |
| L121V | GTT | N124K | AAG | P127L | CTG | T131P | CCG |
| L121H | CAT | N124F | TTT | P127M | ATG | T131A | GCG |
| L121T | ACT | N124W | TGG | L128F | TTT | T131S | TCT |
| L121A | GCT | N124I | ATT | L128M | ATG | T131G | GGT |
| L121N | AAT | N124D | GAT | L128T | ACT | T131I | ATT |
| W122R | CGT | V125G | GGG | L128R | CGT | T131L | CTT |
| W122A | GCG | V125Q | CAG | L128S | TCG | T131H | CAT |
| W122N | AAT | V125S | TCG | L128G | GGT | T131Q | CAG |
| W122P | CCG | V125P | CCG | L128I | ATT | T131D | GAT |
| W122T | ACG | V125M | ATG | L128Q | CAG | T131E | GAG |
| W122L | CTT | V125Y | TAT | L128P | CCT | T131C | TGT |
| T131R | CGT | E135V | GTT | A138C | TGT | M141S | AGT |
| T131Y | TAT | E135M | ATG | A138T | ACG | M141C | TGT |
| T131M | ATG | E135S | TCG | A138S | TCT | M141L | CTG |
| K132G | GGT | E135D | GAT | A138R | CGT | M141A | GCG |
| K132V | GTG | E135T | ACG | A138G | GGG | M141D | GAT |
| K132L | TTG | E135L | CTG | A138E | GAG | M141W | TGG |
| K132A | GCT | E135A | GCG | A138H | CAT | M141G | GGT |
| K132P | CCG | E135W | TGG | A138M | ATG | M141H | CAT |
| K132F | TTT | E135F | TTT | A138Q | CAG | M141Y | TAT |
| K132R | CGG | E135P | CCG | A138I | ATT | M141N | AAT |
| K132I | ATT | E135R | CGG | A138D | GAT | I142L | CTG |
| K132H | CAT | E135N | AAT | A138W | TGG | I142M | ATG |
| K132S | TCT | E135H | CAT | D139R | CGT | I142G | GGT |
| K132M | ATG | E135Q | CAG | D139V | GTT | I142K | AAG |
| K132D | GAT | E135I | ATT | D139M | ATG | I142A | GCT |
| K132T | ACT | G136V | GTG | D139C | TGT | I142N | AAT |
| K132Y | TAT | G136W | TGG | D139P | CCT | I142W | TGG |
| K132E | GAG | G136D | GAT | D139S | TCT | I142P | CCG |
| V133G | GGG | G136M | ATG | D139L | CTT | I142Q | CAG |
| V133E | GAG | G136N | AAT | D139I | ATT | I142Y | TAT |
| V133T | ACT | G136A | GCG | D139H | CAT | I142V | GTG |
| V133N | AAT | G136L | TTG | D139A | GCG | I142T | ACT |
| V133A | GCG | G136C | TGT | D139G | GGG | I142R | CGG |
| V133H | CAT | G136P | CCG | D139F | TTT | I142S | AGT |
| V133P | CCG | G136T | ACG | D139N | AAT | I142F | TTT |
| V133K | AAG | G136R | CGT | D139W | TGG | S143P | CCG |
| V133R | CGG | G136S | TCG | D139Y | TAT | S143C | TGT |
| V133L | CTT | G136I | ATT | D139E | GAG | S143E | GAG |
| V133W | TGG | G136H | CAT | I140D | GAT | S143G | GGT |
| V133C | TGT | G136E | GAG | I140K | AAG | S143H | CAT |
| V133D | GAT | Q137A | GCT | I140A | GCT | S143R | CGT |
| V133M | ATG | Q137R | CGG | I140G | GGG | S143L | TTG |
| V133S | AGT | Q137G | GGG | I140C | TGT | S143Q | CAG |
| S134V | GTT | Q137K | AAG | I140Y | TAT | S143N | AAT |
| S134H | CAT | Q137H | CAT | I140V | GTT | S143W | TGG |
| S134P | CCT | Q137P | CCT | I140W | TGG | S143A | GCT |
| S134G | GGG | Q137S | TCG | I140F | TTT | S143T | ACT |
| S134N | AAT | Q137L | CTG | I140H | CAT | S143Y | TAT |
| S134R | CGT | Q137W | TGG | I140L | CTG | S143M | ATG |
| S134L | CTG | Q137F | TTT | I140R | CGG | S143I | ATT |
| S134Q | CAG | Q137T | ACG | I140E | GAG | F144K | AAG |
| S134E | GAG | Q137C | TGT | I140M | ATG | F144M | ATG |
| S134Y | TAT | Q137Y | TAT | I140T | ACT | F144E | GAG |
| S134A | GCG | Q137N | AAT | M141E | GAG | F144S | AGT |
| S134K | AAG | Q137E | GAG | M141I | ATT | F144L | CTG |
| S134D | GAT | A138V | GTT | M141R | CGG | F144W | TGG |
| S134T | ACG | A138L | CTT | M141T | ACG | F144P | CCG |
| S134C | TGT | A138P | CCG | M141P | CCG | F144R | CGG |
| F144N | AAT | G147V | GTT | R150H | CAT | P154L | CTT |
| F144C | TGT | G147Q | CAG | D151R | CGT | P154C | TGT |
| F144G | GGT | G147M | ATG | D151F | TTT | P154S | TCT |
| F144T | ACT | G147P | CCT | D151P | CCG | P154K | AAG |
| F144Q | CAG | D148R | CGG | D151W | TGG | P154I | ATT |
| F144H | CAT | D148I | ATT | D151Q | CAG | P154A | GCT |
| F144V | GTG | D148T | ACG | D151L | CTT | P154T | ACG |
| V145A | GCG | D148G | GGT | D151S | TCG | P154H | CAT |
| V145T | ACG | D148L | CTG | D151G | GGT | P154Y | TAT |
| V145L | CTG | D148V | GTT | D151A | GCT | P154N | AAT |
| V145P | CCG | D148A | GCG | D151N | AAT | P154F | TTT |
| V145K | AAG | D148W | TGG | D151K | AAG | P154R | CGT |
| V145N | AAT | D148P | CCG | D151Y | TAT | P154Q | CAG |
| V145D | GAT | D148S | TCG | D151V | GTT | F155S | TCT |
| V145H | CAT | D148K | AAG | D151T | ACT | F155T | ACT |
| V145R | CGG | D148E | GAG | D151M | ATG | F155G | GGT |
| V145Q | CAG | D148M | ATG | N152G | GGG | F155N | AAT |
| V145S | TCT | D148N | AAT | N152C | TGT | F155R | CGG |
| V145G | GGG | D148C | TGT | N152F | TTT | F155W | TGG |
| V145W | TGG | H149W | TGG | N152L | TTG | F155L | CTG |
| V145C | TGT | H149A | GCG | N152P | CCG | F155Q | CAG |
| V145E | GAG | H149L | TTG | N152R | CGG | F155M | ATG |
| R146T | ACG | H149C | TGT | N152H | CAT | F155E | GAG |
| R146L | CTG | H149Q | CAG | N152T | ACG | F155A | GCG |
| R146N | AAT | H149T | ACT | N152Y | TAT | F155P | CCT |
| R146H | CAT | H149Y | TAT | N152K | AAG | F155V | GTT |
| R146Q | CAG | H149P | CCG | N152D | GAT | F155H | CAT |
| R146K | AAG | H149V | GTT | N152W | TGG | F155Y | TAT |
| R146C | TGT | H149R | CGG | N152I | ATT | D156H | CAT |
| R146S | AGT | H149G | GGT | N152A | GCG | D156L | CTT |
| R146D | GAT | H149E | GAG | N152S | TCT | D156E | GAG |
| R146A | GCT | H149S | AGT | S153I | ATT | D156A | GCT |
| R146Y | TAT | H149I | ATT | S153R | CGG | D156W | TGG |
| R146P | CCT | H149N | AAT | S153K | AAG | D156C | TGT |
| R146V | GTT | R150S | TCG | S153C | TGT | D156P | CCT |
| R146E | GAG | R150E | GAG | S153G | GGG | D156V | GTT |
| R146F | TTT | R150G | GGG | S153H | CAT | D156K | AAG |
| G147R | CGT | R150M | ATG | S153L | CTT | D156S | TCT |
| G147F | TTT | R150P | CCG | S153V | GTT | D156G | GGG |
| G147I | ATT | R150T | ACG | S153T | ACG | D156T | ACT |
| G147L | CTG | R150W | TGG | S153P | CCT | D156Y | TAT |
| G147A | GCG | R150A | GCG | S153A | GCG | D156R | CGT |
| G147E | GAG | R150N | AAT | S153F | TTT | D156M | ATG |
| G147H | CAT | R150K | AAG | S153D | GAT | G157K | AAG |
| G147W | TGG | R150L | TTG | S153Q | CAG | G157D | GAT |
| G147T | ACG | R150V | GTT | S153Y | TAT | G157F | TTT |
| G147C | TGT | R150D | GAT | P154V | GTT | G157R | CGT |
| G147S | TCT | R150I | ATT | P154W | TGG | G157H | CAT |
| G157L | TTG | G160M | ATG | A163E | GAG | F166C | TGT |
| G157N | AAT | G160C | TGT | A163T | ACG | F166E | GAG |
| G157Y | TAT | G160Q | CAG | A163Q | CAG | Q167D | GAT |
| G157S | TCG | G160V | GTT | A163I | ATT | Q167R | CGG |
| G157T | ACG | G160S | AGT | A163N | AAT | Q167A | GCG |
| G157A | GCT | G160E | GAG | H164L | CTT | Q167S | AGT |
| G157Q | CAG | G160L | CTT | H164M | ATG | Q167F | TTT |
| G157P | CCG | G160T | ACG | H164K | AAG | Q167Y | TAT |
| G157V | GTG | N161S | AGT | H164P | CCG | Q167P | CCG |
| G157M | ATG | N161C | TGT | H164C | TGT | Q167T | ACT |
| P158S | TCT | N161L | TTG | H164R | CGT | Q167V | GTG |
| P158Y | TAT | N161R | CGT | H164A | GCG | Q167L | CTG |
| P158R | CGG | N161G | GGT | H164V | GTG | Q167M | ATG |
| P158L | CTT | N161W | TGG | H164S | TCG | Q167N | AAT |
| P158V | GTG | N161Y | TAT | H164N | AAT | Q167G | GGG |
| P158C | TGT | N161E | GAG | H164G | GGG | Q167K | AAG |
| P158A | GCG | N161P | CCT | H164F | TTT | Q167E | GAG |
| P158W | TGG | N161T | ACG | H164Y | TAT | P168N | AAT |
| P158I | ATT | N161H | CAT | H164Q | CAG | P168F | TTT |
| P158F | TTT | N161I | ATT | H164E | GAG | P168R | CGG |
| P158Q | CAG | N161V | GTG | A165W | TGG | P168W | TGG |
| P158T | ACT | N161F | TTT | A165V | GTT | P168A | GCT |
| P158G | GGT | N161Q | CAG | A165G | GGG | P168T | ACG |
| P158K | AAG | L162A | GCT | A165K | AAG | P168V | GTT |
| P158N | AAT | L162G | GGG | A165L | TTG | P168G | GGG |
| P158D | GAT | L162C | TGT | A165P | CCT | P168C | TGT |
| G159R | CGG | L162P | CCG | A165Q | CAG | P168M | ATG |
| G159S | AGT | L162R | CGG | A165D | GAT | P168H | CAT |
| G159Q | CAG | L162I | ATT | A165H | CAT | P168L | CTT |
| G159P | CCT | L162S | TCT | A165F | TTT | P168S | AGT |
| G159V | GTG | L162D | GAT | A165S | AGT | P168I | ATT |
| G159K | AAG | L162M | ATG | A165T | ACT | P168D | GAT |
| G159A | GCG | L162E | GAG | A165R | CGG | G169H | CAT |
| G159Y | TAT | L162T | ACT | A165N | AAT | G169A | GCG |
| G159E | GAG | L162Y | TAT | A165M | ATG | G169E | GAG |
| G159T | ACG | L162F | TTT | F166G | GGG | G169C | TGT |
| G159M | ATG | L162W | TGG | F166S | TCG | G169S | TCG |
| G159I | ATT | L162Q | CAG | F166L | CTT | G169L | CTG |
| G159W | TGG | A163R | CGT | F166V | GTG | G169V | GTT |
| G159L | CTG | A163G | GGG | F166P | CCT | G169T | ACG |
| G159C | TGT | A163Y | TAT | F166N | AAT | G169R | CGG |
| G160A | GCG | A163P | CCT | F166R | CGT | G169W | TGG |
| G160H | CAT | A163S | AGT | F166A | GCG | G169M | ATG |
| G160N | AAT | A163L | CTT | F166K | AAG | G169I | ATT |
| G160W | TGG | A163C | TGT | F166H | CAT | G169P | CCG |
| G160R | CGG | A163K | AAG | F166W | TGG | G169D | GAT |
| G160P | CCG | A163V | GTG | F166I | ATT | G169Q | CAG |
| G160I | ATT | A163F | TTT | F166M | ATG | P170L | CTT |
| P170R | CGG | G173S | AGT | A176L | CTG | D179I | ATT |
| P170I | ATT | G173A | GCG | A176P | CCT | D179R | CGT |
| P170T | ACG | G173R | AGG | A176N | AAT | D179N | AAT |
| P170F | TTT | G173N | AAT | A176G | GGT | D179W | TGG |
| P170Q | CAG | G173T | ACG | A176S | TCT | D179Q | CAG |
| P170G | GGG | G173D | GAT | A176R | CGT | D179V | GTG |
| P170S | TCT | G173V | GTT | A176K | AAG | D179C | TGT |
| P170H | CAT | G173F | TTT | A176D | GAT | E180M | ATG |
| P170C | TGT | G173M | ATG | A176W | TGG | E180P | CCT |
| P170M | ATG | G173Y | TAT | H177T | ACG | E180K | AAG |
| P170K | AAG | G173P | CCG | H177P | CCG | E180Y | TAT |
| P170W | TGG | G174R | CGT | H177Q | CAG | E180Q | CAG |
| P170D | GAT | G174A | GCG | H177A | GCG | E180R | CGG |
| P170A | GCG | G174E | GAG | H177S | TCG | E180A | GCG |
| G171S | TCT | G174F | TTT | H177G | GGG | E180T | ACT |
| G171M | ATG | G174H | CAT | H177W | TGG | E180I | ATT |
| G171N | AAT | G174T | ACT | H177L | CTG | E180F | TTT |
| G171P | CCT | G174D | GAT | H177V | GTT | E180C | TGT |
| G171R | CGG | G174S | AGT | H177I | ATT | E180G | GGG |
| G171Y | TAT | G174P | CCG | H177R | CGG | E180S | TCG |
| G171A | GCT | G174W | TGG | H177N | AAT | E180N | AAT |
| G171Q | CAG | G174V | GTT | H177Y | TAT | E180D | GAT |
| G171H | CAT | G174N | AAT | H177C | TGT | D181S | TCG |
| G171L | CTT | G174Y | TAT | H177D | GAT | D181Q | CAG |
| G171W | TGG | G174M | ATG | F178G | GGT | D181P | CCT |
| G171C | TGT | G174L | CTT | F178C | TGT | D181Y | TAT |
| G171K | AAG | D175I | ATT | F178W | TGG | D181R | CGT |
| G171E | GAG | D175T | ACG | F178R | CGG | D181V | GTT |
| G171D | GAT | D175N | AAT | F178K | AAG | D181F | TTT |
| I172Y | TAT | D175V | GTT | F178S | AGT | D181A | GCT |
| I172T | ACG | D175S | TCG | F178H | CAT | D181T | ACG |
| I172P | CCT | D175R | CGG | F178P | CCT | D181L | TTG |
| I172A | GCG | D175G | GGG | F178V | GTT | D181E | GAG |
| I172L | CTT | D17SA | GCG | F178A | GCT | D181K | AAG |
| I172Q | CAG | D175F | TTT | F178Q | CAG | D181M | ATG |
| I172E | GAG | D175C | TGT | F178Y | TAT | D181C | TGT |
| I172C | TGT | D175Q | CAG | F178I | ATT | D181G | GGT |
| I172M | ATG | D175Y | TAT | F178T | ACT | E182C | TGT |
| I172D | GAT | D175L | CTG | F178L | CTG | E182P | CCT |
| I172V | GTT | D175H | CAT | F178E | GAG | E182S | AGT |
| I172R | CGT | D175P | CCG | D179P | CCT | E182T | ACG |
| I172G | GGG | D175E | GAG | D179L | TTG | E182R | CGG |
| I172W | TGG | A176F | TTT | D179E | GAG | E182D | GAT |
| I172N | AAT | A176Q | CAG | D179G | GGG | E182A | GCT |
| G173C | TGT | A176V | GTG | D179S | AGT | E182F | TTT |
| G173L | CTG | A176E | GAG | D179A | GCT | E182L | CTT |
| G173K | AAG | A176T | ACT | D179K | AAG | E182I | ATT |
| G173W | TGG | A176C | TGT | D179T | ACT | E182Y | TAT |
| E182Q | CAG | T185D | GAT | R189K | AAG | N192S | TCG |
| E182W | TGG | N186G | GGG | R189P | CCG | N192W | TGG |
| E182M | ATG | N186A | GCT | R189E | GAG | N192G | GGG |
| E182G | GGT | N186T | ACT | R189V | GTT | N192D | GAT |
| R183P | CCT | N186R | CGT | R189D | GAT | N192V | GTG |
| R183K | AAG | N186L | TTG | R189Y | TAT | N192A | GCT |
| R183W | TGG | N186P | CCG | R189C | TGT | N192T | ACT |
| R183E | GAG | N186S | AGT | R189A | GCT | N192K | AAG |
| R183A | GCT | N186V | GTG | R189H | CAT | N192C | TGT |
| R183T | ACG | N186Q | CAG | R189W | TGG | N192M | ATG |
| R183L | CTT | N186H | CAT | R189N | AAT | L193P | CCG |
| R183N | AAT | N186C | TGT | R189T | ACT | L193G | GGG |
| R183H | CAT | N186E | GAG | R189Q | CAG | L193F | TTT |
| R183V | GTG | N186F | TTT | E190A | GCG | L193S | TCG |
| R183C | TGT | N186Y | TAT | E190H | CAT | L193W | TGG |
| R183M | ATG | N186D | GAT | E190V | GTG | L193A | GCT |
| R183I | ATT | N187R | CGG | E190P | CCG | L193R | CGT |
| R183G | GGT | N187M | ATG | E190C | TGT | L193Q | CAG |
| R183S | TCT | N187S | TCT | E190G | GGT | L193E | GAG |
| W184G | GGG | N187T | ACG | E190R | CGG | L193K | AAG |
| W184H | CAT | N187L | CTG | E190I | ATT | L193N | AAT |
| W184L | CTG | N187W | TGG | E190S | TCG | L193I | ATT |
| W184E | GAG | N187F | TTT | E190T | ACT | L193T | ACT |
| W184P | CCT | N187K | AAG | E190M | ATG | L193D | GAT |
| W184N | AAT | N187I | ATT | E190L | TTG | L193Y | TAT |
| W184A | GCG | N187A | GCT | E190K | AAG | H194S | AGT |
| W184T | ACT | N187P | CCG | E190Y | TAT | H194E | GAG |
| W184R | CGG | N187D | GAT | E190D | GAT | H194K | AAG |
| W184Q | CAG | N187G | GGG | Y191T | ACT | H194Q | CAG |
| W184V | GTG | N187C | TGT | Y191H | CAT | H194V | GTT |
| W184S | TCT | N187H | CAT | Y191G | GGG | H194T | ACT |
| W184M | ATG | F188P | CCG | Y191L | TTG | H194L | CTG |
| W184I | ATT | F188I | ATT | Y191P | CCT | H194Y | TAT |
| W184F | TTT | F188N | AAT | Y191Q | CAG | H194F | TTT |
| T185R | CGT | F188S | AGT | Y191K | AAG | H194G | GGT |
| T185Y | TAT | F188Q | CAG | Y191D | GAT | H194I | ATT |
| T185W | TGG | F188K | AAG | Y191A | GCG | H194W | TGG |
| T185H | CAT | F188G | GGG | Y191W | TGG | H194M | ATG |
| T185G | GGG | F188W | TGG | Y191S | TCT | H194A | GCT |
| T185P | CCT | F188E | GAG | Y191V | GTT | H194P | CCT |
| T185S | TCG | F188H | CAT | Y191E | GAG | R195C | TGT |
| T185V | GTT | F188D | GAT | Y191R | CGT | R195F | TTT |
| T185Q | CAG | F188A | GCG | Y191C | TGT | R195W | TGG |
| T185N | AAT | F188L | CTT | N192R | CGG | R195T | ACT |
| T185C | TGT | F188R | CGT | N192L | CTG | R195L | CTG |
| T185L | CTT | F188V | GTT | N192Q | CAG | R195G | GGT |
| T185A | GCG | R189L | TTG | N192P | CCT | R195Q | CAG |
| T185E | GAG | R189G | GGG | N192H | CAT | R195K | AAG |
| R195S | TCT | A198F | TTT | L201N | AAT | L205S | TCT |
| R195A | GCT | A198W | TGG | G202T | ACG | L205G | GGT |
| R195D | GAT | A198Y | TAT | G202Y | TAT | L205P | CCT |
| R195P | CCT | A198D | GAT | G202E | GAG | L205E | GAG |
| R195Y | TAT | H199I | ATT | G202V | GTG | L205V | GTG |
| R195E | GAG | H199P | CCG | G202S | TCT | L205M | ATG |
| R195V | GTG | H199G | GGT | G202L | CTG | L205N | AAT |
| V196T | ACG | H199N | AAT | G202I | ATT | L205C | TGT |
| V196D | GAT | H199S | TCG | G202M | ATG | L205I | ATT |
| V196G | GGG | H199L | TTG | G202H | CAT | L205A | GCG |
| V196E | GAG | H199M | ATG | G202C | TGT | L205R | CGG |
| V196A | GCG | H199A | GCG | G202R | CGT | L205W | TGG |
| V196S | AGT | H199C | TGT | G202P | CCT | L205Q | CAG |
| V196Q | CAG | H199K | AAG | G202A | GCT | G206I | ATT |
| V196P | CCG | H199R | CGT | G202K | AAG | G206V | GTG |
| V196R | CGT | H199V | GTG | G202D | GAT | G206A | GCG |
| V196H | CAT | H199W | TGG | H203Y | TAT | G206C | TGT |
| V196Y | TAT | H199T | ACT | H203E | GAG | G206S | TCG |
| V196I | ATT | H199E | GAG | H203R | CGG | G206P | CCG |
| V196L | CTG | E200P | CCG | H203Q | CAG | G206L | TTG |
| V196K | AAG | E200G | GGG | H203P | CCG | G206D | GAT |
| V196M | ATG | E200A | GCT | H203G | GGG | G206M | ATG |
| A197G | GGT | E200T | ACG | H203T | ACT | G206R | CGG |
| A197S | AGT | E200I | ATT | H203D | GAT | G206Q | CAG |
| A197L | CTT | E200W | TGG | H203L | TTG | G206E | GAG |
| A197P | CCG | E200R | CGG | H203N | AAT | G206H | CAT |
| A197V | GTG | E200F | TTT | H203A | GCT | G206T | ACG |
| A197Y | TAT | E200M | ATG | H203S | TCT | G206W | TGG |
| A197Q | CAG | E200D | GAT | H203V | GTT | L207S | TCT |
| A197R | CGG | E200V | GTG | H203I | ATT | L207Y | TAT |
| A197T | ACT | E200C | TGT | H203C | TGT | L207A | GCG |
| A197I | ATT | E200S | TCT | S204R | CGG | L207R | CGT |
| A197H | CAT | E200Y | TAT | S204N | AAT | L207P | CCG |
| A197E | GAG | E200N | AAT | S204A | GCG | L207Q | CAG |
| A197W | TGG | L201A | GCG | S204T | ACT | L207N | AAT |
| A197N | AAT | L201R | CGG | S204Y | TAT | L207K | AAG |
| A197C | TGT | L201E | GAG | S204V | GTG | L207M | ATG |
| A198T | ACG | L201P | CCT | S204L | CTT | L207W | TGG |
| A198K | AAG | L201G | GGT | S204H | CAT | L207H | CAT |
| A198S | TCG | L201V | GTT | S204D | GAT | L207D | GAT |
| A198H | CAT | L201T | ACG | S204Q | CAG | L207V | GTT |
| A198G | GGT | L201I | ATT | S204G | GGG | L207I | ATT |
| A198E | GAG | L201S | TCT | S204W | TGG | L207G | GGT |
| A198P | CCG | L201W | TGG | S204I | ATT | S208D | GAT |
| A198L | TTG | L201Q | CAG | S204K | AAG | S208V | GTT |
| A198R | CGT | L201D | GAT | S204P | CCT | S208P | CCT |
| A198V | GTT | L201M | ATG | L205T | ACG | S208G | GGT |
| A198M | ATG | L201K | AAG | L205D | GAT | S208A | GCG |
| S208K | AAG | T211Q | CAG | G214A | GCT | M217A | GCG |
| S208N | AAT | T211S | TCG | G214D | GAT | M217H | CAT |
| S208F | TTT | T211A | GCG | G214F | TTT | M217I | ATT |
| S208Q | CAG | T211F | TTT | G214Y | TAT | M217D | GAT |
| S208W | TGG | T211D | GAT | G214M | ATG | Y218C | TGT |
| S208T | ACG | T211W | TGG | G214C | TGT | Y218F | TTT |
| S208E | GAG | T211L | CTG | A215L | CTG | Y218W | TGG |
| S208C | TGT | D212E | GAG | A215Q | CAG | Y218L | CTG |
| S208R | CGT | D212A | GCG | A215M | ATG | Y218A | GCG |
| S208L | CTT | D212K | AAG | A215G | GGT | Y218P | CCG |
| H209T | ACG | D212R | CGG | A215W | TGG | Y218R | CGG |
| H209Y | TAT | D212T | ACG | A215S | AGT | Y218N | AAT |
| H209R | CGG | D212N | AAT | A215T | ACG | Y218V | GTG |
| H209Q | CAG | D212G | GGG | A215V | GTT | Y218Q | CAG |
| H209A | GCT | D212S | TCT | A215N | AAT | Y218I | ATT |
| H209G | GGG | D212P | CCG | A215P | CCG | Y218D | GAT |
| H209N | AAT | D212Q | CAG | A215H | CAT | Y218S | TCG |
| H209P | CCT | D212V | GTT | A215K | AAG | Y218G | GGG |
| H209W | TGG | D212L | TTG | A215I | ATT | Y218E | GAG |
| H209V | GTT | D212F | TTT | A215R | CGT | P219L | TTG |
| H209D | GAT | D212H | CAT | A215C | TGT | P219C | TGT |
| H209S | AGT | D212Y | TAT | A215D | GAT | P219V | GTG |
| H209F | TTT | I213Q | CAG | L216A | GCT | P219D | GAT |
| H209L | CTG | I213T | ACT | L216C | TGT | P219F | TTT |
| H209C | TGT | I213C | TGT | L216D | GAT | P219A | GCG |
| S210C | TGT | I213P | CCT | L216E | GAG | P219T | ACT |
| S210G | GGT | I213H | CAT | L216G | GGG | P219E | GAG |
| S210I | ATT | I213A | GCG | L216I | ATT | P219Q | CAG |
| S210R | CGT | I213V | GTT | L216K | AAG | P219R | CGG |
| S210L | CTG | I213G | GGG | L216M | ATG | P219H | CAT |
| S210V | GTG | I213N | AAT | L216P | CCT | P219G | GGG |
| S210H | CAT | I213L | CTT | L216Q | CAG | P219K | AAG |
| S210N | AAT | I213S | AGT | L216R | CGG | P219S | TCG |
| S210F | TTT | I213M | ATG | L216S | TCT | P219W | TGG |
| S210P | CCG | I213R | CGG | L216T | ACT | S220R | CGT |
| S210W | TGG | I213K | AAG | L216V | GTG | S220A | GCG |
| S210Q | CAG | I213F | TTT | L216W | TGG | S220Q | CAG |
| S210T | ACG | I213D | GAT | M217P | CCT | S220T | ACT |
| S210K | AAG | I213E | GAG | M217Y | TAT | S220L | CTT |
| S210A | GCG | G214L | TTG | M217T | ACG | S220K | AAG |
| T211P | CCG | G214Q | CAG | M217C | TGT | S220G | GGG |
| T211R | CGT | G214S | TCT | M217S | AGT | S220H | CAT |
| T211K | AAG | G214T | ACT | M217L | CTG | S220E | GAG |
| T211G | GGG | G214V | GTG | M217N | AAT | S220M | ATG |
| T211M | ATG | G214I | ATT | M217R | CGG | S220V | GTT |
| T211N | AAT | G214R | CGT | M217Q | CAG | S220P | CCG |
| T211V | GTG | G214P | CCG | M217K | AAG | S220I | ATT |
| T211H | CAT | G214E | GAG | M217G | GGG | S220F | TTT |
| S220N | AAT | S224T | ACG | V227K | AAG | A230S | TCG |
| Y221W | TGG | S224Q | CAG | V227L | CTG | A230C | TGT |
| Y221K | AAG | S224R | CGG | V227P | CCT | A230V | GTT |
| Y221Q | CAG | S224P | CCG | V227S | TCT | A230T | ACT |
| Y221C | TGT | S224I | ATT | V227T | ACT | A230Y | TAT |
| Y221N | AAT | S224V | GTT | V227W | TGG | A230M | ATG |
| Y221P | CCT | S224L | TTG | V227Y | TAT | A230N | AAT |
| Y221V | GTT | S224C | TGT | V227G | GGG | A230H | CAT |
| Y221A | GCG | S224K | AAG | V227H | CAT | Q231I | ATT |
| Y221G | GGG | S224D | GAT | V227Q | CAG | Q231A | GCT |
| Y221R | CGG | S224H | CAT | V227R | CGT | Q231F | TTT |
| Y221S | TCG | S224M | ATG | Q228A | GCT | Q231P | CCT |
| Y221M | ATG | S224A | GCT | Q228D | GAT | Q231Y | TAT |
| Y221T | ACG | S224W | TGG | Q228E | GAG | Q231R | CGT |
| Y221L | CTT | G225D | GAT | Q228G | GGT | Q231L | CTG |
| Y221E | GAG | G225R | CGT | Q228H | CAT | Q231D | GAT |
| T222L | TTG | G225Q | CAG | Q228K | AAG | Q231G | GGT |
| T222Y | TAT | G225M | ATG | Q228L | CTG | Q231V | GTT |
| T222R | CGT | G225P | CCT | Q228M | ATG | Q231W | TGG |
| T222V | GTT | G225W | TGG | Q228N | AAT | Q231S | AGT |
| T222P | CCT | G225S | TCT | Q228P | CCG | Q231H | CAT |
| T222S | AGT | G225E | GAG | Q228R | CGG | Q231C | TGT |
| T222A | GCT | G225V | GTT | Q228S | TCT | Q231M | ATG |
| T222H | CAT | G225T | ACG | Q228T | ACG | D232H | CAT |
| T222G | GGG | G225K | AAG | Q228W | TGG | D232G | GGG |
| T222M | ATG | G225N | AAT | Q228Y | TAT | D232R | CGT |
| T222F | TTT | G225C | TGT | L229R | CGG | D232P | CCT |
| T222C | TGT | G225H | CAT | L229A | GCG | D232Y | TAT |
| T222I | ATT | G225A | GCG | L229T | ACG | D232N | AAT |
| T222N | AAT | D226S | TCT | L229Q | CAG | D232S | TCG |
| T222W | TGG | D226W | TGG | L229P | CCT | D232F | TTT |
| T222D | GAT | D226R | CGG | L229E | GAG | D232V | GTG |
| F223L | TTG | D226A | GCT | L229W | TGG | D232K | AAG |
| F223T | ACG | D226N | AAT | L229M | ATG | D232W | TGG |
| F223C | TGT | D226T | ACT | L229I | ATT | D232Q | CAG |
| F223R | CGT | D226E | GAG | L229G | GGT | D232E | GAG |
| F223N | AAT | D226L | CTT | L229C | TGT | D232T | ACT |
| F223P | CCT | D226P | CCT | L229Y | TAT | D232L | CTG |
| F223E | GAG | D226H | CAT | L229D | GAT | D233Q | CAG |
| F223G | GGG | D226G | GGT | L229H | CAT | D233P | CCG |
| F223Q | CAG | D226I | ATT | L229V | GTG | D233S | TCT |
| F223A | GCG | D226M | ATG | A230L | TTG | D233T | ACG |
| F223S | TCT | D226V | GTG | A230G | GGT | D233A | GCG |
| F223Y | TAT | D226C | TGT | A230W | TGG | D233W | TGG |
| F223H | CAT | V227A | GCT | A230P | CCG | D233G | GGT |
| F223K | AAG | V227C | TGT | A230D | GAT | D233R | CGT |
| F223M | ATG | V227D | GAT | A230R | CGT | D233E | GAG |
| S224G | GGG | V227E | GAG | A230I | ATT | D233N | AAT |
| D233V | GTG | G236N | AAT | I240G | GGG | R243L | CTT |
| D233M | ATG | G236F | TTT | I240Q | CAG | R243A | GCG |
| D233L | CTG | I237S | TCG | I240P | CCG | R243H | CAT |
| D233K | AAG | I237L | CTG | I240R | CGG | R243Q | CAG |
| D233I | ATT | I237R | CGT | I240S | TCG | R243S | AGT |
| I234A | GCT | I237Q | CAG | I240K | AAG | R243I | ATT |
| I234T | ACG | I237K | AAG | I240V | GTG | R243C | TGT |
| I234V | GTT | I237D | GAT | I240D | GAT | R243N | AAT |
| I234W | TGG | I237A | GCG | I240A | GCG | R243Y | TAT |
| I234E | GAG | I237T | ACG | I240C | TGT | R243G | GGG |
| I234G | GGT | I237E | GAG | I240L | CTT | R243D | GAT |
| I234L | CTT | I237C | TGT | I240F | TTT | R243V | GTG |
| I234H | CAT | I237G | GGG | I240Y | TAT | S244P | CCG |
| I234M | ATG | I237P | CCT | I240M | ATG | S244L | CTT |
| I234N | AAT | I237Y | TAT | I240T | ACG | S244W | TGG |
| I234Y | TAT | I237W | TGG | Y241V | GTT | S244M | ATG |
| I234P | CCT | I237N | AAT | Y241A | GCT | S244V | GTT |
| I234D | GAT | Q238G | GGG | Y241G | GGG | S244Q | CAG |
| I234Q | CAG | Q238H | CAT | Y241H | CAT | S244D | GAT |
| I234C | TGT | Q238S | TCG | Y241R | CGG | S244E | GAG |
| D235H | CAT | Q238Y | TAT | Y241P | CCG | S244T | ACG |
| D235G | GGG | Q238F | TTT | Y241Q | CAG | S244H | CAT |
| D235A | GCG | Q238E | GAG | Y241L | TTG | S244G | GGT |
| D235P | CCG | Q238L | TTG | Y241T | ACG | S244A | GCT |
| D235L | CTT | Q238W | TGG | Y241S | AGT | S244F | TTT |
| D235V | GTG | Q238P | CCG | Y241W | TGG | S244Y | TAT |
| D235E | GAG | Q238R | AGG | Y241N | AAT | S244R | CGT |
| D235R | CGT | Q238C | TGT | Y241M | ATG | Q245P | CCT |
| D235Q | CAG | Q238N | AAT | Y241I | ATT | Q245I | ATT |
| D235T | ACG | Q238I | ATT | Y241D | GAT | Q245F | TTT |
| D235C | TGT | Q238T | ACG | G242A | GCG | Q245V | GTT |
| D235S | TCG | Q238K | AAG | G242F | TTT | Q245M | ATG |
| D235N | AAT | A239S | TCT | G242L | CTT | Q245T | ACT |
| D235Y | TAT | A239Q | CAG | G242N | AAT | Q245E | GAG |
| D235I | ATT | A239T | ACG | G242P | CCT | Q245S | TCG |
| G236M | ATG | A239P | CCT | G242W | TGG | Q245R | CGG |
| G236R | CGG | A239V | GTG | G242T | ACG | Q245G | GGT |
| G236D | GAT | A239L | CTG | G242R | CGT | Q245H | CAT |
| G236S | TCT | A239Y | TAT | G242V | GTT | Q245L | CTT |
| G236T | ACT | A239I | ATT | G242S | TCG | Q245K | AAG |
| G236C | TGT | A239C | TGT | G242I | ATT | Q245W | TGG |
| G236K | AAG | A239G | GGG | G242Y | TAT | Q245C | TGT |
| G236E | GAG | A239W | TGG | G242H | CAT | N246W | TGG |
| G236P | CCG | A239F | TTT | G242E | GAG | N246R | CGG |
| G236I | ATT | A239K | AAG | G242K | AAG | N246A | GCG |
| G236Y | TAT | A239H | CAT | R243P | CCG | N246F | TTT |
| G236L | CTG | A239R | CGT | R243K | AAG | N246G | GGT |
| G236V | GTT | A239D | GAT | R243T | ACG | N246P | CCT |
| N246V | GTT | Q249G | GGT | G252P | CCT | T255L | TTG |
| N246Q | CAG | Q249N | AAT | G252H | CAT | T255H | CAT |
| N246Y | TAT | Q249K | AAG | G252C | TGT | P256S | AGT |
| N246C | TGT | Q249I | ATT | G252V | GTT | P256V | GTG |
| N246I | ATT | Q249Y | TAT | G252I | ATT | P256F | TTT |
| N246L | TTG | Q249V | GTG | P253C | TGT | P256Y | TAT |
| N246S | TCT | Q249L | TTG | P253G | GGT | P256I | ATT |
| N246T | ACT | Q249H | CAT | P253Q | CAG | P256A | GCT |
| N246K | AAG | P250L | CTG | P253I | ATT | P256L | CTT |
| N246D | GAT | P250S | TCG | P253L | CTG | P256G | GGT |
| P247A | GCG | P250R | CGG | P253R | CGG | P256N | AAT |
| P247D | GAT | P250Y | TAT | P253A | GCT | P256R | CGG |
| P247E | GAG | P250M | ATG | P253E | GAG | P256Q | CAG |
| P247F | TTT | P250F | TTT | P253Y | TAT | P256E | GAG |
| P247G | GGG | P250A | GCT | P253W | TGG | P256K | AAG |
| P247H | CAT | P250K | AAG | P253M | ATG | P256M | ATG |
| P247I | ATT | P250G | GGT | P253V | GTG | P256C | TGT |
| P247K | AAG | P250N | AAT | P253T | ACT | K257C | TGT |
| P247L | CTG | P250T | ACT | P253K | AAG | K257M | ATG |
| P247N | AAT | P250W | TGG | P253N | AAT | K257V | GTT |
| P247Q | CAG | P250D | GAT | Q254R | CGT | K257A | GCT |
| P247R | CGT | P250V | GTG | Q254G | GGG | K257E | GAG |
| P247S | TCG | P250Q | CAG | Q254W | TGG | K257S | TCT |
| P247T | ACG | I251A | GCG | Q254T | ACT | K257L | CTT |
| P247V | GTT | I251Q | CAG | Q254A | GCT | K257I | ATT |
| V248W | TGG | I251G | GGG | Q254F | TTT | K257G | GGG |
| V248L | CTG | I251L | CTG | Q254D | GAT | K257N | AAT |
| V248Q | CAG | I251K | AAG | Q254P | CCG | K257F | TTT |
| V248M | ATG | I251R | CGT | Q254L | CTG | K257W | TGG |
| V248Y | TAT | I251E | GAG | Q254C | TGT | K257R | CGG |
| V248G | GGG | I251D | GAT | Q254Y | TAT | K257P | CCG |
| V248C | TGT | I251T | ACG | Q254I | ATT | K257T | ACT |
| V248R | CGG | I251C | TGT | Q254E | GAG | A258Q | CAG |
| V248A | GCG | I251Y | TAT | Q254V | GTG | A258Y | TAT |
| V248H | CAT | I251P | CCT | Q254S | TCT | A258W | TGG |
| V248I | ATT | I251S | TCT | T255I | ATT | A258G | GGG |
| V248T | ACT | I251W | TGG | T255Q | CAG | A258L | TTG |
| V248K | AAG | I251V | GTT | T255P | CCG | A258F | TTT |
| V248S | TCG | G252F | TTT | T255R | CGT | A258M | ATG |
| V248F | TTT | G252W | TGG | T255C | TGT | A258N | AAT |
| V248E | GAG | G252A | GCG | T255N | AAT | A258V | GTG |
| Q249T | ACT | G252R | CGG | T255S | AGT | A258T | ACG |
| Q249W | TGG | G252L | CTT | T255V | GTG | A258I | ATT |
| Q249R | CGG | G252E | GAG | T255E | GAG | A258D | GAT |
| Q249E | GAG | G252D | GAT | T255G | GGG | A258R | CGT |
| Q249A | GCT | G252K | AAG | T255K | AAG | A258E | GAG |
| Q249P | CCG | G252S | TCG | T255A | GCT | A258P | CCG |
| Q249C | TGT | G252T | ACG | T255F | TTT | T255L | TTG |

[0633] The DNA encoding each individual library member was generated according to standard DNA synthesis protocols and expressed using routine molecular biology techniques. Briefly, the DNA was ligated into vector pET303CTHis (Invitrogen, SEQ ID NO: 533) using routine molecular biology techniques. Plasmid containing one individual hMMP-1 mutant was transformed into BL21 (DE3) E. coli cells (Tigen, Beiging, China) using manufacturers recommendations. The process was repeated for all library members. The transformation culture was used to inoculate 1 mL LB medium containing ampicillin additives. The culture was grown at 37° C. with shaking for 16 hours. Protein expression was induced by the addition of 1 mM isopropyl-β-D-thiogalactoside (IPTG) and the culture was incubated at 25° C. with shaking. After 6 hours, the cells were pelleted by centrifugation at 6,000 g for 10 minutes and the supernatant was removed. The periplasmic protein was enriched by incubating the cells in 50 μl OS buffer (200 mM Tris-HCV, pH 7.5, 20% sucrose, 1 mM EDTA) with 4 μl DNAse (10 μg/ml), 4 μl RNAse (10 μg/ml), and 4 μl lysozyme (10 μg/ml) for 10 minutes at 25° C. 50 μl of water was added to each well followed by centrifugation at 6000 g for 10 minutes to remove cell debris. The supernatant, containing the hMMP-1 protein, was stored at −20° C. Activity of supernatants were screened as described in the following examples.

B. Cloning and Expression of Wild Type hMMP-1

[0634] In this example, wild type hMMP-1 was individually expressed in both E. coli and CHO-S cells.

[0635] 1. Expression in E. coli

[0636] Wild type hMMP-1 (clone BAP006_{—}10, having a sequence of nucleotides set forth in SEQ ID NO: 534) was cloned into vector pET303CTHis (Invitrogen, SEQ ID NO:533) and grown in BL21 (DE3) E. coli. The pET303CTHis vector contained a C-terminal His tag (SEQ ID NO:235). Protein expression was induced upon the addition of 1 mM isopropyl-β-D-thiogalactoside (IPTG) as described above. Following expression, the protein was enriched as described in Example 27A, and subsequently purified using a HiTrap Ni²⁺ column (GE Healthcare) according to standard molecular biology protocols. Expression and purification were monitored by SDS/PAGE and Western blot analysis.

[0637] 2. Expression in CHO-S Cells

[0638] Wild type hMMP-1 (clone BAP006_{—}2, having a sequence of nucleotides set forth in SEQ ID NO: 534) was expressed in CHO-S cells and secreted into the medium. The wild type hMMP-1 protein was purified using a HiTrap Ni²⁺ column (GE Healthcare) according to standard molecular biology protocols

### Example 28

### Determination of Enzymatic Activity of the hMMP-1 Mutants using a Fluorogenic Peptide Substrate

[0639] In this example, the hMMP-1 mutant library, generated in Example 27, was screened using a high throughput fluorescence activity assay to identify temperature sensitive hMMP-1 mutants. To screen for temporally sensitive hMMP-1 mutants, the enzymtic activity of each individual mutant was determined at 25° C. and 37° C. and/or 34° C., using a commercially available fluorogenic substrate, peptide IX, designated as Mca-K-P-L-G-L-Dpa-A-R-NH₂ (SEQ ID NO: 535; Mca=(7-Methoxycoumarin-4-yl)acetyl; Dpa=N-3-(2,4,-Dinitrophenyl)-L-2,3-diaminopropionyl; R&D Systems, Minneapolis, Minn., Cat# ES101). The peptide substrate contains a highly fluororescent 7-methoxycoumarin group that is quenched by resonance energy transfer to the 2,4-dinitrophenyl group. Activated hMMP-1 cleaves the amide bond between glycine and leucine resulting in an increase in released fluorescence. Reactions were initially performed in a 96-well assay and confirmed using a 14 ml tube format.

A. 96-well Assay

[0640] Prior to assessing activity of the supernatants, supernatants were treated with a processing agent to activate the inactive zymogen form into an active enzyme. Briefly, 411 of each hMMP-1 mutant supernatant generated in Example 27 was added to 100 μl of TCNB (50 nM Tris, 10 mM CaCl₂, 150 mM NaCl, 0.05% Brij 35, pH 7.5) with 1 mM of the processing agent p-aminophenylmercuric acetate (APMA) in a 96-well plate. The solution was incubated at the reaction temperature (either 25° C. or 37° C.) for 2 hours. This activation step cleaves the pro-peptide and generates mature hMMP-1.

[0641] Following activation, 1.6 μl of TCNB containing 620 μM Mca-K-P-L-G-L-Dpa-A-R-NH₂ fluorescent substrate was added to each well to a final concentration of 10 μM, at the indicated reaction temperature (either 25° C. or 37° C.) for 1 hour. Fluorescence was detected by measuring fluorescence in a fluorescent plate reader at 320 m exitation/405 nm emission. Relative fluorescence units (RFU) were determined. Supernatant from wild type hMMP-1 and plasmid/vector transformed cells were used as positive and negative controls. Duplicate reactions were performed for each sample, reaction temperature, and positive and negative control.

[0642] From the initial screen of 2687 hMMP-1 mutants, 199 putative primary hits were identified (see Table 22) with reduced activity at 37° C. These hMMP-1 mutants were rescreened, using the same assay, and 104 primary hits were confirmed (see Table 23, below). hMMP-1 mutants that were active at 25° C. and had at least a 16% decrease in activity at 37° C. (e.g., the ratio of the activities at 25° C. or 37° C. (25° C./37° C.) is greater than or equal to 1.2) were deemed to be confirmed primary temperature sensitive hits. Table 22, below, lists the hMMP-1 mutation, the average RFU at 25° C. and 37° C., and the ratio of the activities (25° C./37° C.). The Table also lists the temperature phenotype:DOWN, indicates the ratio (25° C./37° C.) of the activity of the mutant is decreased compared to the ratio (25° C./37° C.) of the activity of the wild-type, i.e. decreased greater than 16% the activity of the wild type; NEUTRAL, indicates the ratio (25° C./37° C.) of the activity of the mutant is similar to the ratio (25° C./37° C.) of the activity of wild-type, i.e. within 16% of the activity of the wild type; and UP, indicates the ratio (25° C./37° C.) of the activity of the mutant is increased compared to the ratio (25° C./37° C.) of the activity of the wild-type, i.e. increased more than 16% the activity of the wild type.

[0643] Table 22, below, also lists the residual activities at 25° C. and 37° C., as compared to wild type hMMP-1. The residual activity is the ratio of the hMMP-1 mutant activity versus the wildtype hMMP-1 activity at the indicated temperature, either 25° C. or 37° C. Several of the hMMP-1 mutants had activities that were comparable to, or greater than, wildtype hMMP-1 at 25° C. while they all exhibited decreased activities at 37° C., thereby reconfirming their decreased activity at elevated temperatures.

TABLE 22
Results of Initial Screen for Temperature Sensitive hMMP-1 mutants

| | | | | | | Res. | |
|---|---|---|---|---|---|---|---|
| | | | Avg. | Avg. | | Act. | Res. Act. |
| Temp. | hMMP-1 | SEQ | RFU | RFU | Ratio | Mut/wt | Mut/wt |
| Phenotype | mutation | ID NO | 25° C. | 37° C. | 25° C./37° C. | 25° C. | 37° C. |
| Neutral | T84F | 479 | 6312.72 | 6453.46 | 0.98 | 1.10 | 1.27 |
| Neutral | E85F | 480 | 6092.47 | 6362.37 | 0.96 | 1.06 | 1.26 |
| Up | L95K | 328 | 1333.28 | 1191.46 | 1.12 | 0.15 | 0.14 |
| Down | L95I | 329 | 1707.98 | 2294.02 | 0.74 | 0.30 | 0.45 |
| Down | R98D | 481 | 2905.96 | 3867.31 | 0.75 | 0.33 | 0.47 |
| Down | I99Q | 482 | 3318.21 | 4623.91 | 0.72 | 0.37 | 0.56 |
| Down | E100V | 457 | 3980.72 | 5009.20 | 0.79 | 1.26 | 1.01 |
| Neutral | E100R | 451 | 7410.11 | 7964.52 | 0.93 | 0.83 | 0.96 |
| Neutral | E100S | 454 | 3768.09 | 4664.58 | 0.81 | 0.42 | 0.56 |
| Neutral | E100T | 453 | 6985.28 | 7478.12 | 0.93 | 0.79 | 0.90 |
| Neutral | E100F | 455 | 6709.27 | 7436.60 | 0.90 | 0.75 | 0.90 |
| Neutral | E100I | 456 | 8824.19 | 8458.79 | 1.04 | 0.99 | 1.02 |
| Neutral | E100N | 452 | 8809.68 | 8215.63 | 1.07 | 0.99 | 0.99 |
| Neutral | T103Y | 458 | 1181.09 | 1423.76 | 0.83 | 0.37 | 0.29 |
| Neutral | P104A | 484 | 8861.30 | 8360.82 | 1.06 | 1.00 | 1.01 |
| Up | P104M | 483 | 6709.44 | 7118.65 | 0.94 | 0.88 | 0.75 |
| Up | D105A | 340 | 2674.16 | 1227.06 | 2.18 | 0.65 | 0.24 |
| Up | D105F | 336 | 2009.56 | 1221.58 | 1.65 | 0.49 | 0.24 |
| Up | D105G | 335 | 2407.89 | 1686.68 | 1.43 | 0.58 | 0.34 |
| Up | D105I | 338 | 1732.38 | 1105.99 | 1.57 | 0.42 | 0.22 |
| Up | D105L | 339 | 1563.61 | 859.56 | 1.82 | 0.38 | 0.17 |
| Up | D105N | 332 | 3766.72 | 1475.08 | 2.55 | 0.91 | 0.29 |
| Up | D105R | 331 | 3892.02 | 2016.90 | 1.93 | 0.94 | 0.40 |
| Up | D105S | 334 | 3646.49 | 2727.22 | 1.34 | 0.88 | 0.54 |
| Up | D105T | 333 | 2513.64 | 1729.46 | 1.45 | 0.61 | 0.34 |
| Up | D105W | 337 | 2565.93 | 1855.05 | 1.38 | 0.62 | 0.37 |
| Neutral | D105E | 330 | 4000.92 | 3366.64 | 1.19 | 0.59 | 0.45 |
| Neutral | L106C | 485 | 2995.56 | 3678.33 | 0.81 | 0.34 | 0.44 |
| Neutral | L106S | 486 | 2730.64 | 2899.36 | 0.94 | 0.31 | 0.35 |
| Neutral | A109H | 487 | 7206.01 | 7536.96 | 0.96 | 0.81 | 0.91 |
| Neutral | D110A | 488 | 4179.59 | 5112.44 | 0.82 | 0.47 | 0.62 |
| Neutral | V111R | 489 | 2401.69 | 2925.16 | 0.82 | 0.27 | 0.35 |
| Neutral | D112S | 490 | 7203.69 | 7600.93 | 0.95 | 0.81 | 0.92 |
| Neutral | A118T | 491 | 745.83 | 665.63 | 1.12 | 0.13 | 0.13 |
| Down | S123V | 492 | 3220.29 | 4504.25 | 0.71 | 0.41 | 0.60 |
| Neutral | N124D | 493 | 6218.73 | 6620.92 | 0.94 | 0.92 | 0.88 |
| Neutral | T126S | 494 | 7114.42 | 6856.69 | 1.04 | 1.06 | 0.91 |
| Up | G147P | 495 | 494.94 | 392.93 | 1.26 | 0.07 | 0.05 |
| Up | R150P | 345 | 2291.14 | 828.28 | 2.77 | 0.31 | 0.12 |
| Neutral | R150V | 344 | 6869.28 | 6604.61 | 1.04 | 1.20 | 1.30 |
| Neutral | R150D | 341 | 7230.41 | 6033.28 | 1.20 | 1.26 | 1.19 |
| Down | R150I | 343 | 3120.05 | 4082.34 | 0.76 | 0.39 | 0.55 |
| Neutral | R150H | 342 | 8281.04 | 8056.17 | 1.03 | 1.05 | 1.08 |
| Up | D151G | 346 | 1073.32 | 733.89 | 1.46 | 0.20 | 0.11 |
| Neutral | N152A | 497 | 6669.94 | 5660.16 | 1.18 | 1.17 | 1.12 |
| Down | N152S | 496 | 4607.85 | 8096.31 | 0.57 | 0.58 | 1.08 |
| Neutral | S153T | 459 | 10530.07 | 8798.72 | 1.20 | 1.44 | 1.24 |
| Up | F155L | 347 | 1322.13 | 864.19 | 1.53 | 0.25 | 0.13 |
| Up | F155A | 348 | 1250.93 | 760.12 | 1.65 | 0.23 | 0.11 |
| Up | D156H | 349 | 2722.09 | 2081.55 | 1.31 | 0.51 | 0.31 |
| Up | D156L | 356 | 2548.30 | 1597.53 | 1.60 | 0.48 | 0.24 |
| Up | D156A | 357 | 2679.29 | 1734.45 | 1.54 | 0.50 | 0.26 |
| Up | D156W | 354 | 1575.39 | 1268.36 | 1.24 | 0.30 | 0.19 |
| Up | D156V | 355 | 1400.88 | 766.80 | 1.83 | 0.26 | 0.11 |
| Up | D156K | 350 | 1292.89 | 966.62 | 1.34 | 0.24 | 0.14 |
| Up | D156T | 352 | 2871.09 | 1843.03 | 1.56 | 0.54 | 0.27 |
| Up | D156R | 351 | 2431.23 | 1545.89 | 1.57 | 0.46 | 0.23 |
| Up | D156M | 353 | 817.96 | 502.82 | 1.63 | 0.12 | 0.07 |
| Neutral | P158T | 500 | 4204.23 | 3507.76 | 1.20 | 0.53 | 0.47 |
| Neutral | P158G | 501 | 6277.86 | 5496.27 | 1.14 | 0.79 | 0.73 |
| Neutral | P158K | 498 | 6860.82 | 6680.30 | 1.03 | 0.87 | 0.89 |
| Neutral | P158N | 499 | 3656.04 | 3874.48 | 0.94 | 0.46 | 0.52 |
| Up | G159V | 363 | 2453.98 | 732.46 | 3.35 | 0.34 | 0.10 |
| Up | G159T | 359 | 5059.91 | 1734.12 | 2.92 | 0.69 | 0.24 |
| Up | G159M | 360 | 5905.06 | 4874.00 | 1.21 | 0.75 | 0.65 |
| Neutral | G159I | 362 | 5725.99 | 5357.20 | 1.07 | 0.72 | 0.72 |
| Neutral | G159W | 361 | 6787.40 | 6287.71 | 1.08 | 0.86 | 0.84 |
| Neutral | G159L | 364 | 8231.62 | 7638.64 | 1.08 | 1.04 | 1.02 |
| Neutral | G159C | 358 | 2897.77 | 3053.86 | 0.95 | 0.37 | 0.41 |
| Neutral | P170D | 502 | 1434.38 | 1462.91 | 0.98 | 0.25 | 0.29 |
| Neutral | P170A | 503 | 2733.72 | 2793.24 | 0.98 | 0.48 | 0.55 |
| Up | G171P | 462 | 1570.74 | 1204.39 | 1.30 | 0.27 | 0.17 |
| Neutral | G171E | 461 | 1154.96 | 1199.65 | 0.96 | 0.20 | 0.24 |
| Neutral | G171D | 460 | 791.81 | 690.33 | 1.15 | 0.14 | 0.14 |
| Up | A176F | 365 | 10486.82 | 6516.31 | 1.61 | 1.31 | 0.78 |
| Neutral | A176W | 366 | 482.38 | 414.85 | 1.16 | 0.06 | 0.06 |
| Neutral | F178T | 504 | 560.54 | 487.01 | 1.15 | 0.10 | 0.10 |
| Up | F178L | 505 | 1788.95 | 1314.38 | 1.36 | 0.31 | 0.26 |
| Up | D179N | 368 | 2433.73 | 812.01 | 3.00 | 0.26 | 0.10 |
| Up | D179V | 369 | 604.63 | 490.35 | 1.23 | 0.11 | 0.10 |
| Up | D179C | 367 | 613.81 | 503.76 | 1.22 | 0.11 | 0.10 |
| Up | E180Y | 374 | 6655.19 | 5379.42 | 1.24 | 0.72 | 0.63 |
| Neutral | E180R | 371 | 6932.51 | 6309.81 | 1.10 | 0.75 | 0.74 |
| Up | E180T | 373 | 3718.16 | 2425.13 | 1.53 | 0.40 | 0.29 |
| Up | E180F | 377 | 7014.78 | 5382.78 | 1.30 | 0.76 | 0.63 |
| Up | E180G | 376 | 5952.65 | 4547.28 | 1.31 | 1.04 | 0.90 |
| Up | E180S | 375 | 5217.80 | 3977.60 | 1.31 | 0.91 | 0.78 |
| Up | E180N | 372 | 6534.65 | 4843.84 | 1.35 | 1.14 | 0.96 |
| Up | E180D | 370 | 7738.70 | 6277.22 | 1.23 | 1.35 | 1.24 |
| Neutral | D181T | 380 | 6867.00 | 6057.09 | 1.13 | 0.74 | 0.71 |
| Up | D181L | 382 | 1727.20 | 1274.09 | 1.36 | 0.19 | 0.15 |
| Up | D181K | 378 | 1087.36 | 696.83 | 1.56 | 0.12 | 0.08 |
| Up | D181C | 379 | 549.29 | 447.40 | 1.23 | 0.10 | 0.09 |
| Up | D181G | 381 | 2764.20 | 2056.56 | 1.34 | 0.48 | 0.41 |
| Up | E182T | 384 | 2995.97 | 1779.42 | 1.68 | 0.32 | 0.21 |
| Up | E182Q | 383 | 1393.28 | 804.84 | 1.73 | 0.15 | 0.09 |
| Up | E182M | 386 | 649.73 | 524.43 | 1.24 | 0.11 | 0.10 |
| Neutral | E182G | 385 | 604.92 | 543.78 | 1.11 | 0.11 | 0.11 |
| Up | R183G | 507 | 7326.36 | 6021.39 | 1.22 | 1.28 | 1.19 |
| Up | R183S | 506 | 7896.17 | 6240.74 | 1.27 | 1.38 | 1.23 |
| Up | T185R | 390 | 1728.04 | 851.07 | 2.03 | 0.20 | 0.10 |
| Up | T185Y | 392 | 937.75 | 540.66 | 1.73 | 0.11 | 0.07 |
| Up | T185H | 389 | 1448.04 | 783.89 | 1.85 | 0.17 | 0.10 |
| Up | T185G | 393 | 3922.30 | 1990.15 | 1.97 | 0.46 | 0.24 |
| Up | T185V | 394 | 1648.14 | 897.66 | 1.84 | 0.19 | 0.11 |
| Up | T185Q | 391 | 1594.81 | 583.93 | 2.73 | 0.19 | 0.07 |
| Up | T185A | 395 | 1599.64 | 711.08 | 2.25 | 0.19 | 0.09 |
| Up | T185E | 388 | 1324.02 | 703.76 | 1.88 | 0.16 | 0.09 |
| Neutral | T185D | 387 | 485.86 | 418.67 | 1.16 | 0.06 | 0.06 |
| Up | N187R | 398 | 1042.36 | 709.74 | 1.47 | 0.12 | 0.09 |
| Up | N187M | 402 | 1731.67 | 995.07 | 1.74 | 0.20 | 0.12 |
| Neutral | N187W | 403 | 1694.86 | 1425.68 | 1.19 | 0.20 | 0.17 |
| Up | N187F | 401 | 1240.41 | 731.98 | 1.69 | 0.15 | 0.09 |
| Up | N187K | 397 | 2331.93 | 1140.19 | 2.05 | 0.27 | 0.14 |
| Up | N187I | 404 | 1444.98 | 683.03 | 2.12 | 0.17 | 0.08 |
| Up | N187A | 405 | 4379.80 | 2616.49 | 1.67 | 0.52 | 0.32 |
| Neutral | N187G | 400 | 535.06 | 514.10 | 1.04 | 0.07 | 0.07 |
| Neutral | N187C | 399 | 1804.28 | 1860.67 | 0.97 | 0.23 | 0.25 |
| Neutral | N187H | 396 | 1143.07 | 1071.67 | 1.07 | 0.14 | 0.14 |
| Up | F188V | 508 | 7116.29 | 5860.00 | 1.21 | 1.24 | 1.16 |
| Neutral | R189N | 509 | 7842.39 | 6675.36 | 1.17 | 1.37 | 1.32 |
| Neutral | R189T | 511 | 7610.10 | 6459.94 | 1.18 | 1.33 | 1.27 |
| Neutral | R189Q | 510 | 7465.37 | 6396.79 | 1.17 | 1.30 | 1.26 |
| Up | E190G | 465 | 5313.99 | 4365.93 | 1.22 | 0.75 | 0.48 |
| Up | E190Y | 464 | 7243.54 | 5742.33 | 1.26 | 1.27 | 1.13 |
| Up | E190D | 463 | 7910.21 | 6468.78 | 1.22 | 1.38 | 1.28 |
| Up | Y191V | 466 | 1553.58 | 1254.11 | 1.24 | 0.19 | 0.14 |
| Up | N192H | 468 | 2274.24 | 1058.80 | 2.15 | 0.32 | 0.12 |
| Up | N192S | 470 | 2043.65 | 1630.74 | 1.25 | 0.29 | 0.18 |
| Up | N192D | 467 | 4213.33 | 2216.40 | 1.90 | 0.59 | 0.24 |
| Up | N192C | 469 | 1310.46 | 987.31 | 1.33 | 0.18 | 0.11 |
| Neutral | H194P | 471 | 5264.79 | 5058.19 | 1.04 | 0.74 | 0.56 |
| Up | R195C | 407 | 4231.32 | 1853.20 | 2.28 | 0.60 | 0.20 |
| Neutral | R195W | 410 | 5099.23 | 4524.84 | 1.13 | 0.72 | 0.50 |
| Neutral | R195L | 412 | 5073.57 | 4520.73 | 1.12 | 0.72 | 0.50 |
| Up | R195G | 409 | 5269.21 | 3025.93 | 1.74 | 0.74 | 0.33 |
| Up | R195Q | 408 | 1958.69 | 1361.83 | 1.44 | 0.28 | 0.15 |
| Up | R195A | 413 | 5605.90 | 3852.81 | 1.46 | 0.79 | 0.42 |
| Up | R195D | 406 | 2724.53 | 1907.81 | 1.43 | 0.38 | 0.21 |
| Up | R195V | 411 | 1711.48 | 1037.62 | 1.65 | 0.24 | 0.11 |
| Up | A197C | 512 | 4012.80 | 3140.52 | 1.28 | 0.70 | 0.62 |
| Neutral | A198G | 414 | 2610.82 | 2368.26 | 1.10 | 0.37 | 0.26 |
| Up | A198L | 416 | 1339.94 | 726.74 | 1.84 | 0.19 | 0.08 |
| Up | A198M | 415 | 1384.46 | 999.55 | 1.39 | 0.20 | 0.11 |
| Up | G206A | 418 | 4554.61 | 2702.11 | 1.69 | 0.47 | 0.30 |
| Up | G206S | 417 | 1226.37 | 919.66 | 1.33 | 0.13 | 0.10 |
| Up | L207R | 472 | 3476.88 | 1332.44 | 2.61 | 0.36 | 0.15 |
| Neutral | L207V | 475 | 656.95 | 550.54 | 1.19 | 0.08 | 0.07 |
| Neutral | L207I | 474 | 645.37 | 550.32 | 1.17 | 0.08 | 0.07 |
| Up | L207G | 473 | 610.01 | 484.35 | 1.26 | 0.08 | 0.06 |
| Neutral | S208R | 513 | 7639.06 | 6465.10 | 1.18 | 1.34 | 1.28 |
| Up | S208L | 514 | 7811.78 | 6354.14 | 1.23 | 1.37 | 1.25 |
| Up | S210V | 419 | 1190.35 | 856.63 | 1.39 | 0.29 | 0.17 |
| Neutral | S210A | 420 | 1682.05 | 1546.97 | 1.09 | 0.25 | 0.21 |
| Neutral | T211L | 515 | 2376.23 | 2102.07 | 1.13 | 0.35 | 0.28 |
| Up | D212G | 477 | 1011.62 | 657.28 | 1.54 | 0.24 | 0.13 |
| Neutral | D212H | 476 | 4696.49 | 4001.41 | 1.17 | 0.70 | 0.53 |
| Up | Y218S | 421 | 3702.49 | 3099.73 | 1.19 | 0.58 | 0.43 |
| Up | F223C | 424 | 3115.11 | 2488.91 | 1.25 | 0.53 | 0.35 |
| Up | F223E | 422 | 7194.34 | 5884.03 | 1.22 | 1.22 | 0.83 |
| Up | F223G | 426 | 3236.56 | 2599.04 | 1.25 | 0.55 | 0.36 |
| Up | F223A | 428 | 5226.86 | 3982.92 | 1.31 | 0.89 | 0.56 |
| Up | F223S | 425 | 6006.80 | 4916.07 | 1.22 | 1.02 | 0.69 |
| Neutral | F223K | 423 | 4021.97 | 3712.91 | 1.08 | 0.60 | 0.49 |
| Neutral | F223M | 427 | 525.66 | 441.29 | 1.19 | 0.08 | 0.06 |
| Up | V227C | 433 | 4040.96 | 3278.65 | 1.23 | 0.68 | 0.46 |
| Up | V227D | 429 | 1190.09 | 731.34 | 1.63 | 0.20 | 0.10 |
| Up | V227E | 430 | 5381.63 | 2605.20 | 2.07 | 0.91 | 0.37 |
| Up | V227L | 438 | 4883.98 | 4000.68 | 1.22 | 0.83 | 0.56 |
| Up | V227S | 435 | 3863.33 | 3131.47 | 1.23 | 0.65 | 0.44 |
| Up | V227W | 437 | 1845.46 | 1374.06 | 1.34 | 0.31 | 0.19 |
| Neutral | V227G | 436 | 1040.74 | 883.01 | 1.18 | 0.15 | 0.12 |
| Up | V227H | 431 | 689.20 | 504.65 | 1.37 | 0.10 | 0.07 |
| Up | V227Q | 434 | 696.97 | 506.11 | 1.38 | 0.10 | 0.07 |
| Neutral | V227R | 432 | 664.31 | 561.06 | 1.18 | 0.10 | 0.07 |
| Up | Q228P | 439 | 2862.74 | 1291.55 | 2.22 | 1.33 | 0.44 |
| Up | L229A | 442 | 2627.78 | 2118.07 | 1.24 | 1.22 | 0.72 |
| Up | L229T | 440 | 3780.54 | 1464.25 | 2.58 | 1.75 | 0.50 |
| Up | L229I | 441 | 1158.56 | 828.94 | 1.40 | 0.54 | 0.28 |
| Up | A230V | 478 | 5030.94 | 3433.18 | 1.47 | 2.33 | 1.17 |
| Up | D233E | 443 | 2881.17 | 1918.57 | 1.50 | 1.33 | 0.65 |
| Up | I234A | 447 | 1458.10 | 1018.50 | 1.43 | 0.31 | 0.18 |
| Up | I234T | 446 | 1451.51 | 1188.67 | 1.22 | 0.31 | 0.21 |
| Up | I234E | 444 | 1301.06 | 840.09 | 1.55 | 0.27 | 0.15 |
| Up | I234Q | 445 | 1095.18 | 837.53 | 1.31 | 0.23 | 0.15 |
| Up | I237L | 518 | 2880.14 | 2240.61 | 1.29 | 0.61 | 0.39 |
| Down | I237W | 517 | 4188.38 | 5663.94 | 0.74 | 0.62 | 0.75 |
| Neutral | I237N | 516 | 5368.49 | 6271.59 | 0.86 | 0.80 | 0.83 |
| Up | I240S | 449 | 2033.91 | 1204.66 | 1.69 | 0.32 | 0.15 |
| Neutral | I240A | 450 | 2099.13 | 1776.41 | 1.18 | 0.33 | 0.23 |
| Up | I240C | 448 | 970.78 | 650.04 | 1.49 | 0.15 | 0.08 |
| Neutral | I251S | 519 | 8445.88 | 7160.96 | 1.18 | 1.07 | 0.96 |
| Neutral | I251W | 520 | 7305.95 | 6974.26 | 1.05 | 0.92 | 0.93 |
| Neutral | Q254S | 521 | 7768.13 | 8801.19 | 0.88 | 1.15 | 1.17 |
| Neutral | T255H | 522 | 8243.01 | 7352.60 | 1.12 | 1.22 | 0.98 |
| Neutral | P256C | 523 | 4674.45 | 4633.67 | 1.01 | 0.69 | 0.62 |
| Neutral | K257P | 525 | 8039.60 | 7464.88 | 1.08 | 1.19 | 0.99 |
| Neutral | K257T | 524 | 9346.88 | 8849.42 | 1.06 | 1.39 | 1.18 |
| Neutral | A258P | 526 | 10414.06 | 9178.82 | 1.13 | 1.55 | 1.22 |

TABLE 23
Reconfirmed HITs

| Temperature | hMMP-1 | SEQ ID |
|---|---|---|
| Phenotype | mutation | NO |
| Up | L95K | 328 |
| Down | E100V | 457 |
| Neutral | T103Y | 458 |
| Up | D105A | 340 |
| Up | D105F | 336 |
| Up | D105G | 335 |
| Up | D105I | 338 |
| Up | D105L | 339 |
| Up | D105N | 332 |
| Up | D105R | 331 |
| Up | D105S | 334 |
| Up | D105T | 333 |
| Up | D105W | 337 |
| Up | R150P | 345 |
| Up | D151G | 346 |
| Neutral | S153T | 459 |
| Up | F155L | 347 |
| Up | F155A | 348 |
| Up | D156H | 349 |
| Up | D156L | 356 |
| Up | D156A | 357 |
| Up | D156W | 354 |
| Up | D156V | 355 |
| Up | D156K | 350 |
| Up | D156T | 352 |
| Up | D156R | 351 |
| Up | G159V | 363 |
| Up | G159T | 359 |
| Up | G171P | 462 |
| Up | A176F | 365 |
| Up | D179N | 368 |
| Up | E180Y | 374 |
| Neutral | E180R | 371 |
| Up | E180T | 373 |
| Up | E180F | 377 |
| Neutral | D181T | 380 |
| Up | D181L | 382 |
| Up | D181K | 378 |
| Up | E182T | 384 |
| Up | E182Q | 383 |
| Up | T185R | 390 |
| Up | T185Y | 392 |
| Up | T185H | 389 |
| Up | T185G | 393 |
| Up | T185V | 394 |
| Up | T185Q | 391 |
| Up | T185A | 395 |
| Up | T185E | 388 |
| Up | N187R | 398 |
| Up | N187M | 402 |
| Neutral | N187W | 403 |
| Up | N187F | 401 |
| Up | N187K | 397 |
| Up | N187I | 404 |
| Up | N187A | 405 |
| Up | E190G | 465 |
| Up | Y191V | 466 |
| Up | N192H | 468 |
| Up | N192S | 470 |
| Up | N192D | 467 |
| Up | N192C | 469 |
| Neutral | H194P | 471 |
| Up | R195C | 407 |
| Neutral | R195W | 410 |
| Neutral | R195L | 412 |
| Up | R195G | 409 |
| Up | R195Q | 408 |
| Up | R195A | 413 |
| Up | R195D | 406 |
| Up | R195V | 411 |
| Neutral | A198G | 414 |
| Up | A198L | 416 |
| Up | A198M | 415 |
| Up | G206A | 418 |
| Up | G206S | 417 |
| Up | L207R | 472 |
| Up | S210V | 419 |
| Up | D212G | 477 |
| Up | Y218S | 421 |
| Up | F223C | 424 |
| Up | F223E | 422 |
| Up | F223G | 426 |
| Up | F223A | 428 |
| Up | F223S | 425 |
| Up | V227C | 433 |
| Up | V227D | 429 |
| Up | V227E | 430 |
| Up | V227L | 438 |
| Up | V227S | 435 |
| Up | V227W | 437 |
| Up | Q228P | 439 |
| Up | L229A | 442 |
| Up | L229T | 440 |
| Up | L229I | 441 |
| Up | A230V | 478 |
| Up | D233E | 443 |
| Up | I234A | 447 |
| Up | I234T | 446 |
| Up | I234E | 444 |
| Up | I234Q | 445 |
| Up | I237L | 518 |
| Up | I240S | 449 |
| Neutral | I240A | 450 |
| Up | I240C | 448 |

### B. 14-mL Protein Expression

[0644] In this example, the hMMP-1 mutants that were identified as temperature sensitive primary hits in Example 28A were expressed in 14 ml culture tubes and their enzymatic activity was measured at 25° C., 34° C. and 37° C. for 1 hour, 2 hours or overnight in order to verify the desired phenotype of decreased activity at elevated temperatures. Protein was expressed and purified as in Example 27 with the exception that the expression was performed in 14 ml tubes rather than a 96-well plate.

[0645] Four (4) μl of each hMMP-1 mutant supernatant was transferred to a 96-well microplate. Supernatants were activated with APMA as described in Example 28A above, except that the solution was incubated at the reaction temperature of 25° C., 34° C., or 37° C. for 2 hours. As above, following activation, 100 μl of TCNB containing 10 μl M Mca-K-P-L-G-L-Dpa-A-R-NH₂ fluorescent substrate was added to each tube at the indicated reaction temperature (25° C., 34° C. or 37° C.) for one hour. Wild-type hMMP-1 was used as a positive control and supernatant from cells transformed with the vector was used as a negative control. Fluorescence was detected by measuring fluorescence in a fluorescent plate reader at 320 nm exitation/405 nm emission. Relative fluorescence units (RFU) were determined. Duplicate reactions were performed for each sample, reaction temperature, and positive and negative control.

[0646] The data is shown in Table 24A (1 hour incubation); Table 24B (2 hour incubations) and Table 24C (overnight incubation), below. Mutants that were active at 25° C. but demonstrated at least a 33% decreased activity at 34° C. or 37° C. (i.e. had a ratio of activity at 25° C. and 34° C. or a ratio of activity of 25° C. and 37° C. equal to or greater than 1.5 under any of the time point conditions tested were identified as temperature sensitive Hits. Tables 24A-24C, below, list the hMMP-1 mutation, the RFU at 25° C., 34° C. and 37° C., and the ratio of the activities (at both 25° C./34° C. and 25° C./37° C.) of 64 hMMP-1 mutants whose decreased enzymatic activity at elevated temperatures were confirmed. Some of the hMMP-1 mutants, were noticeably more active at 25° C. than at an elevated temperature. For example, hMMP-1 mutant D179N (SEQ ID NO:368) was 87.5% more active at 25° C. than 37° C. after an overnight incubation (see e.g. Table 24C). Additionally, although expression levels, and therefore overall RFU values, varied in different experiments, the ratios of the activities remained the same. For example, mutant D156T was tested twice (see Table 24C below) and although each test gave different data RFU values the ratio of the values were similar and consistently within the 1.5 ratio parameter.

TABLE 24A
Temperature Sensitive hMMP-1 Mutants, 1 hour incubation

| | | | | | Ratio | Ratio |
|---|---|---|---|---|---|---|
| hMMP-1 | SEQ ID | RFU | RFU | RFU | 25° C./ | 25° C./ |
| mutation | NO | 25° C. | 34° C. | 37° C. | 34° C. | 37° C. |
| L95K | 328 | 2677.64 | 553.00 | 572.70 | 4.84 | 4.68 |
| D105A | 340 | 3496.48 | 697.79 | 1119.92 | 5.01 | 3.12 |
| D105F | 336 | 1749.85 | 554.69 | 685.49 | 3.15 | 2.55 |
| D105G | 335 | 7450.35 | 2196.32 | 3514.50 | 3.39 | 2.12 |
| D105I | 338 | 4720.96 | 638.42 | 943.44 | 7.39 | 5.00 |
| D105L | 339 | 2636.80 | 490.04 | 552.90 | 5.38 | 4.77 |
| D105N | 332 | 7487.95 | 776.33 | 1513.73 | 9.65 | 4.95 |
| D105R | 331 | 1732.70 | 641.23 | 736.92 | 2.70 | 2.35 |
| D105S | 334 | 8637.40 | 3782.36 | 6510.05 | 2.28 | 1.33 |
| D105W | 337 | 4263.51 | 1321.69 | 2422.77 | 3.23 | 1.76 |
| D105T | 333 | 2666.45 | 770.72 | 1685.33 | 3.46 | 1.58 |
| R150P | 345 | 7568.19 | 1678.59 | 2010.33 | 4.51 | 3.76 |
| D151G | 346 | 973.47 | 517.98 | 595.63 | 1.88 | 1.63 |
| F155A | 348 | 1800.92 | 592.07 | 596.31 | 3.04 | 3.02 |
| D156K | 350 | 8718.91 | 1733.90 | 1839.60 | 5.03 | 4.74 |
| D156T | 352 | 8034.06 | 2216.02 | 2255.25 | 3.63 | 3.56 |
| D156L | 356 | 1825.01 | 528.43 | 619.10 | 3.45 | 2.95 |
| D156A | 357 | 1495.21 | 450.17 | 496.04 | 3.32 | 3.01 |
| D156W | 354 | 1006.97 | 463.48 | 493.84 | 2.17 | 2.04 |
| D156V | 355 | 1140.60 | 484.30 | 504.38 | 2.36 | 2.26 |
| D156T | 352 | 2796.00 | 581.90 | 743.53 | 4.80 | 3.76 |
| D156H | 349 | 3489.60 | 578.59 | 711.59 | 6.03 | 4.90 |
| D156R | 351 | 4983.67 | 678.23 | 734.95 | 7.35 | 6.78 |
| G159V | 363 | 3416.77 | 705.80 | 739.87 | 4.84 | 4.62 |
| G159T | 359 | 4081.99 | 1732.63 | 1865.15 | 2.36 | 2.19 |
| A176F | 365 | 967.31 | 539.31 | 517.16 | 1.79 | 1.87 |
| D179N | 368 | 4105.85 | 492.00 | 513.37 | 8.35 | 8.00 |
| E180Y | 374 | 8803.90 | 3904.31 | 5268.18 | 2.25 | 1.67 |
| E180T | 373 | 5957.38 | 1155.89 | 1430.72 | 5.15 | 4.16 |
| E180F | 377 | 7484.41 | 2677.89 | 3141.69 | 2.79 | 2.38 |
| D181L | 382 | 1629.22 | 559.04 | 549.09 | 2.91 | 2.97 |
| D181K | 378 | 844.40 | 570.98 | 569.44 | 1.48 | 1.48 |
| E182T | 384 | 2244.96 | 653.93 | 668.01 | 3.43 | 3.36 |
| E182Q | 383 | 1066.68 | 583.87 | 582.84 | 1.83 | 1.83 |
| T185R | 390 | 1599.19 | 867.00 | 872.66 | 1.84 | 1.83 |
| T185H | 389 | 3616.30 | 1601.20 | 1842.01 | 2.26 | 1.96 |
| T185Q | 391 | 4365.21 | 1512.02 | 1899.46 | 2.89 | 2.30 |
| T185A | 395 | 1374.00 | 567.04 | 608.05 | 2.42 | 2.26 |
| T185E | 388 | 2145.28 | 1263.20 | 1399.76 | 1.70 | 1.53 |
| N187R | 398 | 1659.90 | 955.75 | 1054.91 | 1.74 | 1.57 |
| N187M | 402 | 2842.50 | 1343.95 | 1464.36 | 2.12 | 1.94 |
| N187F | 401 | 1846.10 | 716.62 | 786.07 | 2.58 | 2.35 |
| N187K | 397 | 2428.31 | 1703.73 | 1914.84 | 1.43 | 1.27 |
| N187I | 404 | 2455.44 | 717.51 | 773.59 | 3.42 | 3.17 |
| R195V | 411 | 3121.02 | 1947.80 | 2132.94 | 1.60 | 1.46 |
| A198L | 416 | 4547.61 | 1570.19 | 2061.87 | 2.90 | 2.21 |
| A198M | 415 | 1948.92 | 1101.86 | 1535.22 | 1.77 | 1.27 |
| G206A | 418 | 667.50 | 543.90 | 540.79 | 1.23 | 1.23 |
| G206S | 417 | 608.46 | 427.44 | 412.07 | 1.42 | 1.48 |
| S210V | 419 | 1952.12 | 961.54 | 1791.55 | 2.03 | 1.09 |
| Y218S | 421 | 1674.47 | 1531.03 | 1573.00 | 1.09 | 1.06 |
| F223E | 422 | 5837.16 | 2747.99 | 4955.08 | 2.12 | 1.18 |
| V227C | 433 | 1138.96 | 684.05 | 722.68 | 1.67 | 1.58 |
| V227E | 430 | 5892.76 | 653.81 | 803.12 | 9.01 | 7.34 |
| V227W | 437 | 716.50 | 607.92 | 646.75 | 1.18 | 1.11 |
| Q228P | 439 | 676.11 | 488.99 | 495.88 | 1.38 | 1.36 |
| L229T | 440 | 768.59 | 492.66 | 491.49 | 1.56 | 1.56 |
| L229I | 441 | 1470.04 | 753.87 | 1231.17 | 1.95 | 1.19 |
| D233E | 443 | 1195.07 | 959.25 | 1056.45 | 1.25 | 1.13 |
| I234A | 447 | 1402.15 | 1014.61 | 1127.63 | 1.38 | 1.24 |
| I234T | 446 | 857.79 | 644.52 | 712.49 | 1.33 | 1.20 |
| I234E | 444 | 2281.82 | 591.10 | 762.52 | 3.86 | 2.99 |
| I240S | 449 | 2678.36 | 776.88 | 1314.40 | 3.45 | 2.04 |
| I240C | 448 | 1540.91 | 474.82 | 666.63 | 3.25 | 2.31 |

TABLE 24B
Temperature Sensitive hMMP-1 Mutants, 2 hours incubation

| | | | | | Ratio | Ratio |
|---|---|---|---|---|---|---|
| hMMP-1 | SEQ ID | RFU | RFU | RFU | 25° C./ | 25° C./ |
| mutation | NO | 25° C. | 34° C. | 37° C. | 34° C. | 37° C. |
| L95K | 328 | 4650.42 | 748.29 | 746.89 | 6.21 | 6.23 |
| D105A | 340 | 5669.31 | 824.07 | 1336.14 | 6.88 | 4.24 |
| D105F | 336 | 2980.00 | 623.89 | 818.63 | 4.78 | 3.64 |
| D105G | 335 | 8821.81 | 2759.24 | 4313.40 | 3.20 | 2.05 |
| D105I | 338 | 6832.34 | 780.32 | 1110.07 | 8.76 | 6.15 |
| D105L | 339 | 4206.38 | 534.24 | 607.46 | 7.87 | 6.92 |
| D105N | 332 | 8920.05 | 918.13 | 1727.44 | 9.72 | 5.16 |
| D105R | 331 | 2821.20 | 722.46 | 813.68 | 3.90 | 3.47 |
| D105S | 334 | 9355.63 | 4607.18 | 7274.97 | 2.03 | 1.29 |
| D105W | 337 | 6663.80 | 1690.93 | 3081.59 | 3.94 | 2.16 |
| D105T | 333 | 4457.16 | 974.63 | 2220.03 | 4.57 | 2.01 |
| R150P | 345 | 8750.30 | 2315.11 | 2497.86 | 3.78 | 3.50 |
| D151G | 346 | 1264.62 | 589.27 | 616.51 | 2.15 | 2.05 |
| F155A | 348 | 2824.01 | 779.72 | 746.59 | 3.62 | 3.78 |
| D156K | 350 | 8576.47 | 2210.63 | 2310.30 | 3.88 | 3.71 |
| D156T | 352 | 8727.27 | 2679.17 | 2752.35 | 3.26 | 3.17 |
| D156L | 356 | 2916.24 | 576.84 | 688.08 | 5.06 | 4.24 |
| D156A | 357 | 2299.63 | 533.68 | 554.21 | 4.31 | 4.15 |
| D156W | 354 | 1502.86 | 539.74 | 575.12 | 2.78 | 2.61 |
| D156V | 355 | 1593.06 | 534.71 | 542.36 | 2.98 | 2.94 |
| D156T | 352 | 4469.68 | 690.87 | 848.14 | 6.47 | 5.27 |
| D156H | 349 | 5387.79 | 698.77 | 819.82 | 7.71 | 6.57 |
| D156R | 351 | 7020.81 | 793.83 | 872.40 | 8.84 | 8.05 |
| G159V | 363 | 4673.44 | 856.78 | 838.46 | 5.45 | 5.57 |
| G159T | 359 | 6704.95 | 2294.40 | 2347.74 | 2.92 | 2.86 |
| A176F | 365 | 1609.85 | 654.43 | 618.72 | 2.46 | 2.60 |
| D179N | 368 | 5660.69 | 644.51 | 656.31 | 8.78 | 8.63 |
| E180Y | 374 | 8557.09 | 4979.24 | 6079.36 | 1.72 | 1.41 |
| E180T | 373 | 7870.99 | 1532.35 | 1794.15 | 5.14 | 4.39 |
| E180F | 377 | 8508.13 | 3597.75 | 3975.22 | 2.36 | 2.14 |
| D181L | 382 | 2710.97 | 619.39 | 611.92 | 4.38 | 4.43 |
| D181K | 378 | 1130.63 | 625.01 | 608.68 | 1.81 | 1.86 |
| E182T | 384 | 3702.08 | 791.23 | 826.28 | 4.68 | 4.48 |
| E182Q | 383 | 1331.50 | 639.84 | 623.11 | 2.08 | 2.14 |
| T185R | 390 | 2637.31 | 1187.63 | 1183.37 | 2.22 | 2.23 |
| T185H | 389 | 5593.77 | 2278.26 | 2534.15 | 2.46 | 2.21 |
| T185Q | 391 | 7006.87 | 2250.58 | 2642.74 | 3.11 | 2.65 |
| T185A | 395 | 2474.96 | 663.82 | 707.09 | 3.73 | 3.50 |
| T185E | 388 | 3948.43 | 2088.15 | 2091.32 | 1.89 | 1.89 |
| N187R | 398 | 3006.08 | 1352.97 | 1421.87 | 2.22 | 2.11 |
| N187M | 402 | 4934.44 | 1811.35 | 1893.07 | 2.72 | 2.61 |
| N187F | 401 | 3227.96 | 877.21 | 931.04 | 3.68 | 3.47 |
| N187K | 397 | 4182.49 | 2425.34 | 2652.79 | 1.72 | 1.58 |
| N187I | 404 | 4218.55 | 849.11 | 887.80 | 4.97 | 4.75 |
| R195V | 411 | 4847.81 | 2724.92 | 2984.10 | 1.78 | 1.62 |
| A198L | 416 | 6756.76 | 2056.50 | 2642.76 | 3.29 | 2.56 |
| A198M | 415 | 3777.50 | 1708.61 | 2155.58 | 2.21 | 1.75 |
| G206A | 418 | 872.27 | 603.01 | 586.57 | 1.45 | 1.49 |
| G206S | 417 | 932.69 | 492.65 | 463.60 | 1.89 | 2.01 |
| S210V | 419 | 3349.95 | 1249.47 | 2314.86 | 2.68 | 1.45 |
| Y218S | 421 | 2878.50 | 2373.98 | 2350.27 | 1.21 | 1.22 |
| F223E | 422 | 8318.70 | 3685.68 | 6209.93 | 2.26 | 1.34 |
| V227C | 433 | 1998.67 | 950.01 | 992.19 | 2.10 | 2.01 |
| V227E | 430 | 7904.54 | 839.00 | 1015.12 | 9.42 | 7.79 |
| V227W | 437 | 996.55 | 729.20 | 787.87 | 1.37 | 1.26 |
| Q228P | 439 | 1082.56 | 607.78 | 586.63 | 1.78 | 1.85 |
| L229T | 440 | 1221.05 | 580.15 | 564.49 | 2.10 | 2.16 |
| L229I | 441 | 2790.27 | 1050.86 | 1803.44 | 2.66 | 1.55 |
| D233E | 443 | 2195.02 | 1393.95 | 1454.71 | 1.57 | 1.51 |
| I234A | 447 | 2375.42 | 1473.70 | 1594.08 | 1.61 | 1.49 |
| I234T | 446 | 1199.18 | 713.83 | 796.81 | 1.68 | 1.50 |
| I234E | 444 | 3920.02 | 705.86 | 923.57 | 5.55 | 4.24 |
| I240S | 449 | 3867.71 | 973.97 | 1575.05 | 3.97 | 2.46 |
| I240C | 448 | 2688.75 | 561.91 | 853.66 | 4.78 | 3.15 |

TABLE 24C
Temperature Sensitive hMMP-1 Mutants, Overnight incubation

| | | | | | Ratio | Ratio |
|---|---|---|---|---|---|---|
| hMMP-1 | SEQ ID | RFU | RFU | RFU | 25° C./ | 25° C./ |
| mutation | NO | 25° C. | 34° C. | 37° C. | 34° C. | 37° C. |
| L95K | 328 | 7744.34 | 1803.12 | 1677.96 | 4.29 | 4.62 |
| D105A | 340 | 8466.62 | 1302.84 | 1931.17 | 6.50 | 4.38 |
| D105F | 336 | 6725.59 | 938.60 | 1173.23 | 7.17 | 5.73 |
| D105G | 335 | 8940.06 | 3560.75 | 5390.32 | 2.51 | 1.66 |
| D105I | 338 | 8394.32 | 1614.57 | 1958.96 | 5.20 | 4.29 |
| D105L | 339 | 6546.78 | 957.95 | 1070.51 | 6.83 | 6.12 |
| D105N | 332 | 9119.04 | 1459.16 | 2347.74 | 6.25 | 3.88 |
| D105R | 331 | 5775.25 | 1407.06 | 1499.57 | 4.10 | 3.85 |
| D105S | 334 | 9300.85 | 5584.70 | 8234.95 | 1.67 | 1.13 |
| D105W | 337 | 8617.36 | 2851.22 | 4593.06 | 3.02 | 1.88 |
| D105T | 333 | 7910.47 | 1899.25 | 3292.01 | 4.17 | 2.40 |
| R150P | 345 | 9011.11 | 3533.16 | 3559.66 | 2.55 | 2.53 |
| D151G | 346 | 1956.65 | 959.80 | 1097.68 | 2.04 | 1.78 |
| F155A | 348 | 4891.89 | 2016.76 | 1843.31 | 2.43 | 2.65 |
| D156K | 350 | 8696.27 | 3968.92 | 3858.90 | 2.19 | 2.25 |
| D156T | 352 | 8972.20 | 3971.43 | 3854.84 | 2.26 | 2.33 |
| D156L | 356 | 5254.55 | 972.64 | 1232.94 | 5.40 | 4.26 |
| D156A | 357 | 3585.37 | 1098.25 | 1110.73 | 3.26 | 3.23 |
| D156W | 354 | 2570.24 | 1091.27 | 1206.22 | 2.36 | 2.13 |
| D156V | 355 | 2208.99 | 954.21 | 997.64 | 2.31 | 2.21 |
| D156T | 352 | 7229.28 | 1256.02 | 1540.11 | 5.76 | 4.69 |
| D156H | 349 | 7587.19 | 1451.49 | 1763.27 | 5.23 | 4.30 |
| D156R | 351 | 8622.23 | 1735.02 | 1846.71 | 4.97 | 4.67 |
| G159V | 363 | 6555.27 | 1821.53 | 1683.20 | 3.60 | 3.89 |
| G159T | 359 | 9105.95 | 3210.57 | 3160.07 | 2.84 | 2.88 |
| A176F | 365 | 4191.69 | 1414.21 | 1336.32 | 2.96 | 3.14 |
| D179N | 368 | 7317.57 | 1504.84 | 1485.28 | 4.86 | 4.93 |
| E180Y | 374 | 9281.77 | 6080.89 | 6894.61 | 1.53 | 1.35 |
| E180T | 373 | 8475.04 | 2585.89 | 2809.15 | 3.28 | 3.02 |
| E180F | 377 | 9360.74 | 5183.25 | 5335.15 | 1.81 | 1.75 |
| D181L | 382 | 4534.34 | 1078.98 | 1000.80 | 4.20 | 4.53 |
| D181K | 378 | 1869.47 | 946.27 | 928.55 | 1.98 | 2.01 |
| E182T | 384 | 6752.25 | 1483.52 | 1496.55 | 4.55 | 4.51 |
| E182Q | 383 | 2212.75 | 1065.07 | 1035.24 | 2.08 | 2.14 |
| T185R | 390 | 6281.97 | 2425.71 | 2300.61 | 2.59 | 2.73 |
| T185H | 389 | 8531.85 | 3164.69 | 3515.59 | 2.70 | 2.43 |
| T185Q | 391 | 9044.23 | 3639.00 | 4012.93 | 2.49 | 2.25 |
| T185A | 395 | 6156.97 | 1110.68 | 1059.61 | 5.54 | 5.81 |
| T185E | 388 | 8479.18 | 3868.06 | 3892.33 | 2.19 | 2.18 |
| N187R | 398 | 7593.11 | 2415.63 | 2370.01 | 3.14 | 3.20 |
| N187M | 402 | 8605.76 | 2769.52 | 2720.28 | 3.11 | 3.16 |
| N187F | 401 | 7352.85 | 1612.23 | 1704.23 | 4.56 | 4.31 |
| N187K | 397 | 8667.36 | 3458.94 | 3709.62 | 2.51 | 2.34 |
| N187I | 404 | 8306.40 | 1459.25 | 1465.77 | 5.69 | 5.67 |
| R195V | 411 | 8634.05 | 4648.03 | 4960.91 | 1.86 | 1.74 |
| A198L | 416 | 8795.36 | 3469.36 | 4181.78 | 2.54 | 2.10 |
| A198M | 415 | 8352.73 | 3215.69 | 3637.79 | 2.60 | 2.30 |
| G206A | 418 | 2492.53 | 1038.14 | 974.96 | 2.40 | 2.56 |
| G206S | 417 | 2845.84 | 908.82 | 808.42 | 3.13 | 3.52 |
| S210V | 419 | 7104.17 | 2441.96 | 3939.90 | 2.91 | 1.80 |
| Y218S | 421 | 7740.61 | 4057.37 | 4093.29 | 1.91 | 1.89 |
| F223E | 422 | 9650.44 | 4849.58 | 7645.34 | 1.99 | 1.26 |
| V227C | 433 | 5833.84 | 2207.20 | 2432.82 | 2.64 | 2.40 |
| V227E | 430 | 8630.90 | 2283.07 | 2152.81 | 3.78 | 4.01 |
| V227W | 437 | 3070.92 | 1370.13 | 1456.45 | 2.24 | 2.11 |
| Q228P | 439 | 3673.33 | 1162.95 | 1081.32 | 3.16 | 3.40 |
| L229T | 440 | 3543.75 | 1103.34 | 1030.05 | 3.21 | 3.44 |
| L229I | 441 | 7333.92 | 1832.18 | 3268.93 | 4.00 | 2.24 |
| D233E | 443 | 6694.93 | 2570.71 | 2661.43 | 2.60 | 2.52 |
| I234A | 447 | 6250.56 | 3890.90 | 4043.80 | 1.61 | 1.55 |
| I234T | 446 | 3507.08 | 1099.58 | 1228.23 | 3.19 | 2.86 |
| I234E | 444 | 7541.73 | 1365.08 | 1901.96 | 5.52 | 3.97 |
| I240S | 449 | 4376.99 | 2108.15 | 2592.19 | 2.08 | 1.69 |
| I240C | 448 | 6170.51 | 1174.96 | 2223.23 | 5.25 | 2.78 |

[0647] Table 25 below depicts the residual activity (the ratio of hMMP-1 mutant RFU/wt hMMP-1 RFU) of the hMMP-1 mutants following overnight incubation with the fluorescent peptide. The activity of mutants at 25° C., 34° C., or 37° C. were compared to the activity of wild-type hMMP-1 at the respective temperatures. At 25° C., five hMMP-1 mutants (E180F, E180Y, D156T, D156K, R150P) were more active than wildtype hMMP-1 as indicated by a residual activity >1. At elevated temperatures, all of the hMMP-1 mutants exhibited an overall decrease in activity when compared to wildtype hMMP-1 at the same temperature, thus confirming the phenotype of the hMMP-1 mutants as temperature sensitive mutants.

TABLE 25
Residual Activity of hMMP-1 Temperature Sensitive
Mutants, Overnight Incubation

| | | Residual | Residual | Residual |
|---|---|---|---|---|
| hMMP-1 | SEQ ID | Activity | Activity | Activity |
| mutation | NO | 25° C. | 34° C. | 37° C. |
| L95K | 328 | 0.80 | 0.20 | 0.20 |
| D105A | 340 | 0.93 | 0.15 | 0.22 |
| D105F | 336 | 0.74 | 0.11 | 0.13 |
| D105G | 335 | 0.99 | 0.42 | 0.60 |
| D105I | 338 | 0.93 | 0.19 | 0.22 |
| D105L | 339 | 0.72 | 0.11 | 0.12 |
| D105N | 332 | 1.01 | 0.17 | 0.26 |
| D105R | 331 | 0.64 | 0.16 | 0.17 |
| D105S | 334 | 1.03 | 0.65 | 0.92 |
| D105W | 337 | 0.95 | 0.33 | 0.51 |
| D105T | 333 | 0.87 | 0.22 | 0.37 |
| R150P | 345 | 0.99 | 0.41 | 0.44 |
| D151G | 346 | 0.22 | 0.11 | 0.12 |
| F155A | 348 | 0.51 | 0.22 | 0.22 |
| D156K | 350 | 0.97 | 0.46 | 0.46 |
| D156T | 352 | 1.00 | 0.46 | 0.46 |
| D156L | 356 | 0.58 | 0.11 | 0.14 |
| D156A | 357 | 0.40 | 0.13 | 0.12 |
| D156W | 354 | 0.28 | 0.13 | 0.14 |
| D156V | 355 | 0.24 | 0.11 | 0.11 |
| D156T | 352 | 0.80 | 0.15 | 0.17 |
| D156H | 349 | 0.84 | 0.17 | 0.20 |
| D156R | 351 | 0.95 | 0.20 | 0.21 |
| G159V | 363 | 0.73 | 0.21 | 0.20 |
| G159T | 359 | 1.00 | 0.37 | 0.39 |
| A176F | 365 | 0.43 | 0.16 | 0.16 |
| D179N | 368 | 0.81 | 0.17 | 0.18 |
| E180Y | 374 | 1.02 | 0.70 | 0.85 |
| E180T | 373 | 0.93 | 0.30 | 0.35 |
| E180F | 377 | 1.03 | 0.60 | 0.66 |
| D181L | 382 | 0.50 | 0.12 | 0.12 |
| D181K | 378 | 0.21 | 0.11 | 0.11 |
| E182T | 384 | 0.74 | 0.17 | 0.18 |
| E182Q | 383 | 0.24 | 0.12 | 0.13 |
| T185R | 390 | 0.69 | 0.28 | 0.28 |
| T185H | 389 | 0.94 | 0.37 | 0.43 |
| T185Q | 391 | 1.00 | 0.42 | 0.49 |
| T185A | 395 | 0.68 | 0.13 | 0.13 |
| T185E | 388 | 0.93 | 0.45 | 0.48 |
| N187R | 398 | 0.84 | 0.28 | 0.29 |
| N187M | 402 | 0.95 | 0.32 | 0.33 |
| N187F | 401 | 0.81 | 0.19 | 0.21 |
| N187K | 397 | 0.95 | 0.40 | 0.46 |
| N187I | 404 | 0.92 | 0.17 | 0.18 |
| R195V | 411 | 0.96 | 0.54 | 0.59 |
| A198L | 416 | 0.98 | 0.40 | 0.49 |
| A198M | 415 | 0.87 | 0.36 | 0.42 |
| G206A | 418 | 0.27 | 0.12 | 0.12 |
| G206S | 417 | 0.31 | 0.10 | 0.10 |
| S210V | 419 | 0.78 | 0.29 | 0.44 |
| Y218S | 421 | 0.85 | 0.47 | 0.50 |
| F223E | 422 | 1.07 | 0.57 | 0.86 |
| V227C | 433 | 0.64 | 0.26 | 0.27 |
| V227E | 430 | 0.95 | 0.27 | 0.24 |
| V227W | 437 | 0.34 | 0.16 | 0.16 |
| Q228P | 439 | 0.38 | 0.13 | 0.13 |
| L229T | 440 | 0.37 | 0.12 | 0.12 |
| L229I | 441 | 0.76 | 0.20 | 0.38 |
| D233E | 443 | 0.69 | 0.28 | 0.31 |
| I234A | 447 | 0.69 | 0.45 | 0.45 |
| I234T | 446 | 0.39 | 0.13 | 0.14 |
| I234E | 444 | 0.83 | 0.16 | 0.21 |
| I240S | 449 | 0.48 | 0.25 | 0.29 |
| I240C | 448 | 0.68 | 0.14 | 0.25 |

C. hMMP-1 Top Mutant Hits

[0648] Fourteen (14) positions were identified at top hit positions: 95, 105, 150, 156, 159, 179, 180, 182, 185, 187, 198, 227, 234 and 240. Twenty three (23) hMMP-1 mutants at 14 positions were selected as top hits based on two criteria, including: 1) the ratio of the activities (25° C. to 37° C. and 25° C. to 34° C.); and 2) the activity (in RFUs). All of the mutants listed in Table 26 below had an activity greater than 2000 and a ratio of 25° C. to 37° C. greater than 2. The eleven Hits identified with a ** are the Hits that ranked high for both the ratio or activities and the activity level, and were used to develop a combinatorial library as described in Example 29.

TABLE 26
Top Hits

| | | | |
|---|---|---|---|
| L95K** | D105I | D105N** | D105L |
| D105A | D105G | R150P** | D156R |
| D156H | D156K** | D156T** | G159V** |
| G159T | D179N** | E180T** | E180F |
| E182T | T185Q | N187I | A198L** |
| V227E** | I234E | I240S** | |

### Example 29

### Combinatorial hMMP-1 Variant Library

[0649] In this example, a combinatorial hMMP-1 variant library was generated from the mutants selected in Example 28C and shown in Table 26 with a double asterix (**). Mutants at positions 182, 185 and 187 were excluded in the generation of the combinatorial library because of the importance of these positions for hMMP-1 catalytic activity. The library contained every possible combination of amino acid variants for each of the selected mutants. Table 27 depicts all mutant combinations contained in the library. The positions indicated are with respect to positons corresponding to amino acid residues of hMMP-1 set forth in SEQ ID NO:327. Each row and column indicates one polypeptide containing the noted mutations. For example, 156K 179N 227E, refers to a polypeptide containing three amino acid replacements at positions corresponding to positions set forth in SEQ ID NO:327: D by K at position 156, D by N at position 179 and V by E at position 227. The library was generated and expressed as described in Example 27.

TABLE 27
Combinatorial Library Mutants

| | | | |
|---|---|---|---|
| 95K | 150P 156T | 156K 179N 227E | 150P 156T 240S |
| 105N | 105N 240S | 156K 179N 198L | 150P 156T 227E |
| 150P | 105N 227E | 156K 179N 180T | 150P 156T 198L |
| 156K | 105N 198L | 156K 159V 240S | 150P 156T 180T |
| 156T | 105N 180T | 156K 159V 227E | 150P 156T 179N |
| 159V | 105N 179N | 156K 159V 198L | 150P 156T 159V |
| 179N | 105N 159V | 156K 159V 180T | 105N 227E 240S |
| 180T | 105N 156K | 156K 159V 179N | 105N 198L 240S |
| 198L | 105N 156T | 156T 227E 240S | 105N 198L 227E |
| 227E | 105N 150P | 156T 198L 240S | 105N 180T 240S |
| 240S | 95K 240S | 156T 198L 227E | 105N 180T 227E |
| 227E 240S | 95K 227E | 156T 180T 240S | 105N 180T 198L |
| 198L 240S | 95K 198L | 156T 180T 227E | 105N 179N 240S |
| 198L 227E | 95K 180T | 156T 180T 198L | 105N 179N 227E |
| 180T 240S | 95K 179N | 156T 179N 240S | 105N 179N 198L |
| 180T 227E | 95K 159V | 156T 179N 227E | 105N 179N 180T |
| 180T 198L | 95K 156T | 156T 179N 198L | 105N 159V 240S |
| 179N 240S | 95K 150P | 156T 179N 180T | 105N 159V 227E |
| 179N 227E | 95K 105N | 156T 159V 240S | 105N 159V 198L |
| 179N 198L | 95K 156K | 156T 159V 227E | 105N 159V 180T |
| 179N 180T | 180T 227E 240S | 156T 159V 198L | 105N 159V 179N |
| 159V 240S | 180T 198L 240S | 156T 159V 180T | 105N 156K 240S |
| 159V 227E | 180T 198L 227E | 156T 159V 179N | 105N 156K 227E |
| 159V 198L | 179N 227E 240S | 150P 227E 240S | 105N 156K 198L |
| 159V 180T | 179N 198L 240S | 198L 227E 240S | 105N 156K 180T |
| 159V 179N | 179N 198L 227E | 150P 198L 240S | 105N 156K 179N |
| 156K 240S | 179N 180T 240S | 150P 198L 227E | 105N 156K 159V |
| 156K 227E | 179N 180T 227E | 150P 180T 240S | 105N 156T 240S |
| 156K 198L | 179N 180T 198L | 150P 180T 227E | 105N 156T 227E |
| 156K 180T | 159V 227E 240S | 150P 180T 198L | 105N 156T 198L |
| 156K 179N | 159V 198L 240S | 150P 179N 240S | 105N 156T 180T |
| 156K 159V | 159V 198L 227E | 150P 179N 227E | 105N 156T 179N |
| 156T 240S | 159V 180T 240S | 150P 179N 198L | 105N 156T 159V |
| 156T 227E | 159V 180T 227E | 150P 179N 180T | 105N 150P 240S |
| 156T 198L | 159V 180T 198L | 150P 159V 240S | 105N 150P 227E |
| 156T 180T | 159V 179N 240S | 150P 159V 227E | 105N 150P 198L |
| 156T 179N | 159V 179N 227E | 150P 159V 198L | 105N 150P 180T |
| 156T 159V | 159V 179N 198L | 150P 159V 180T | 105N 150P 179N |
| 150P 240S | 159V 179N 180T | 150P 159V 179N | 105N 150P 159V |
| 150P 227E | 156K 227E 240S | 150P 156K 240S | 105N 150P 156K |
| 150P 198L | 156K 198L 240S | 150P 156K 227E | 105N 150P 156T |
| 150P 180T | 156K 198L 227E | 150P 156K 198L | 95K 227E 240S |
| 150P 179N | 156K 180T 240S | 150P 156K 180T | 95K 198L 240S |
| 150P 156K | 156K 180T 227E | 156K 180T 198L | 150P 156K 179N |
| 150P 159V | 156K 179N 240S | 150P 156K 159V | 95K 180T 240S |

| | | |
|---|---|---|
| 95K 180T 227E | 179N 180T 198L 240S | 156T 159V 180T 198L |
| 95K 180T 198L | 179N 180T 198L 227E | 156T 159V 179N 240S |
| 95K 179N 240S | 159V 198L 227E 240S | 156T 159V 179N 227E |
| 95K 179N 227E | 159V 180T 227E 240S | 156T 159V 179N 198L |
| 95K 179N 198L | 159V 180T 198L 240S | 156T 159V 179N 180T |
| 95K 179N 180T | 159V 180T 198L 227E | 150P 198L 227E 240S |
| 95K 159V 240S | 159V 179N 227E 240S | 150P 180T 227E 240S |
| 95K 159V 227E | 159V 179N 198L 240S | 150P 180T 198L 240S |
| 95K 159V 198L | 159V 179N 198L 227E | 150P 180T 198L 227E |
| 95K 159V 180T | 159V 179N 180T 240S | 150P 179N 227E 240S |
| 95K 159V 179N | 159V 179N 180T 227E | 150P 179N 198L 240S |
| 95K 156K 240S | 159V 179N 180T 198L | 150P 179N 198L 227E |
| 95K 156K 227E | 156K 198L 227E 240S | 150P 179N 180T 240S |
| 95K 156K 198L | 156K 180T 227E 240S | 150P 179N 180T 227E |
| 95K 156K 180T | 156K 180T 198L 240S | 150P 179N 180T 198L |
| 95K 156K 179N | 156K 180T 198L 227E | 150P 159V 227E 240S |
| 95K 156K 159V | 156K 179N 227E 240S | 150P 159V 198L 240S |
| 95K 198L 227E | 156K 179N 198L 240S | 150P 159V 198L 227E |
| 95K 156T 240S | 156K 179N 198L 227E | 150P 159V 180T 240S |
| 95K 156T 227E | 156K 179N 180T 240S | 150P 159V 180T 227E |
| 95K 156T 198L | 156K 179N 180T 227E | 150P 159V 180T 198L |
| 95K 156T 180T | 156K 179N 180T 198L | 150P 159V 179N 240S |
| 95K 156T 179N | 156K 159V 227E 240S | 150P 159V 179N 227E |
| 95K 156T 159V | 156K 159V 198L 240S | 150P 159V 179N 198L |
| 95K 150P 240S | 156K 159V 198L 227E | 150P 159V 179N 180T |
| 95K 150P 227E | 156K 159V 180T 240S | 150P 156K 227E 240S |
| 95K 150P 198L | 156K 159V 180T 227E | 150P 156K 198L 240S |
| 95K 150P 180T | 156K 159V 180T 198L | 150P 156K 198L 227E |
| 95K 150P 179N | 156K 159V 179N 240S | 150P 156K 180T 240S |
| 95K 150P 159V | 156K 159V 179N 227E | 150P 156K 180T 227E |
| 95K 150P 156K | 156K 159V 179N 198L | 150P 156K 180T 198L |
| 95K 150P 156T | 156K 159V 179N 180T | 150P 156K 179N 240S |
| 95K 105N 240S | 156T 198L 227E 240S | 150P 156K 179N 227E |
| 95K 105N 227E | 156T 180T 227E 240S | 150P 156K 179N 198L |
| 95K 105N 198L | 156T 180T 198L 240S | 150P 156K 179N 180T |
| 95K 105N 180T | 156T 180T 198L 227E | 150P 156K 159V 240S |
| 95K 105N 179N | 156T 179N 227E 240S | 150P 156K 159V 227E |
| 95K 105N 159V | 156T 179N 198L 240S | 156T 179N 180T 240S |
| 95K 105N 156K | 156T 179N 198L 227E | 156T 179N 180T 227E |
| 95K 105N 156T | 156T 159V 227E 240S | 156T 179N 180T 198L |
| 95K 105N 150P | 156T 159V 198L 240S | 150P 156T 227E 240S |
| 180T 198L 227E 240S | 156T 159V 198L 227E | 150P 156T 198L 240S |
| 179N 198L 227E 240S | 156T 159V 180T 240S | 150P 156T 198L 227E |
| 179N 180T 227E 240S | 156T 159V 180T 227E | 150P 156T 180T 240S |
| 150P 156T 180T 227E | 105N 156T 198L 240S | 95K 180T 198L 227E |
| 150P 156T 180T 198L | 105N 156T 180T 227E | 95K 179N 180T 227E |
| 150P 156T 179N 240S | 105N 156T 180T 198L | 95K 179N 180T 198L |
| 150P 156T 179N 227E | 105N 156T 179N 240S | 95K 159V 227E 240S |
| 150P 156T 179N 198L | 105N 156T 179N 227E | 95K 159V 198L 240S |
| 150P 156T 179N 180T | 105N 156T 179N 198L | 95K 159V 198L 227E |
| 150P 156T 159V 240S | 105N 156T 179N 180T | 95K 159V 180T 240S |
| 150P 156T 159V 227E | 105N 156T 159V 240S | 95K 159V 180T 227E |
| 150P 156T 159V 198L | 105N 156T 159V 227E | 95K 159V 180T 198L |
| 150P 156T 159V 180T | 105N 156T 159V 198L | 95K 159V 179N 240S |
| 150P 156T 159V 179N | 105N 156T 159V 180T | 95K 159V 179N 227E |
| 105N 198L 227E 240S | 105N 156T 159V 179N | 95K 159V 179N 198L |
| 105N 180T 227E 240S | 105N 150P 227E 240S | 95K 159V 179N 180T |
| 105N 180T 198L 240S | 105N 150P 198L 240S | 95K 156K 227E 240S |
| 105N 180T 198L 227E | 105N 150P 198L 227E | 95K 156K 198L 240S |
| 105N 179N 227E 240S | 105N 150P 180T 240S | 95K 156K 198L 227E |
| 105N 179N 198L 240S | 105N 150P 180T 227E | 95K 156K 180T 240S |
| 105N 179N 198L 227E | 105N 150P 180T 198L | 95K 156K 180T 227E |
| 105N 179N 180T 240S | 105N 150P 179N 240S | 95K 156K 180T 198L |
| 105N 179N 180T 227E | 105N 150P 179N 227E | 95K 156K 179N 240S |
| 105N 179N 180T 198L | 105N 150P 179N 198L | 95K 156K 179N 227E |
| 105N 159V 227E 240S | 105N 150P 179N 180T | 95K 156K 179N 198L |
| 105N 159V 198L 240S | 105N 150P 159V 240S | 95K 156K 179N 180T |
| 105N 159V 198L 227E | 105N 150P 159V 227E | 95K 156K 159V 240S |
| 105N 159V 180T 240S | 105N 150P 159V 198L | 95K 156K 159V 227E |
| 105N 159V 180T 227E | 105N 150P 159V 180T | 95K 156K 159V 198L |
| 105N 159V 180T 198L | 105N 150P 159V 179N | 95K 156K 159V 180T |
| 105N 159V 179N 240S | 105N 150P 156K 240S | 95K 156K 159V 179N |
| 105N 159V 179N 227E | 105N 150P 156K 227E | 95K 156T 227E 240S |
| 105N 159V 179N 198L | 105N 150P 156K 198L | 95K 156T 198L 240S |
| 105N 159V 179N 180T | 105N 150P 156K 180T | 95K 156T 198L 227E |
| 105N 156K 227E 240S | 105N 156K 180T 227E | 95K 156T 180T 240S |
| 105N 156K 198L 240S | 105N 156K 180T 198L | 105N 150P 156K 179N |
| 105N 156K 198L 227E | 105N 156K 179N 240S | 105N 150P 156K 159V |
| 105N 156K 180T 240S | 105N 156K 179N 227E | 105N 150P 156T 240S |
| 150P 156K 159V 198L | 105N 156K 179N 198L | 105N 150P 156T 227E |
| 150P 156K 159V 180T | 105N 156K 179N 180T | 105N 150P 156T 198L |
| 150P 156K 159V 179N | 105N 150P 156T 179N | 105N 150P 156T 180T |
| 105N 156K 159V 240S | 105N 150P 156T 159V | 95K 156T 179N 198L |
| 105N 156K 159V 227E | 95K 198L 227E 240S | 95K 156T 179N 180T |
| 105N 156K 159V 198L | 95K 180T 227E 240S | 95K 156T 159V 240S |
| 105N 156K 159V 180T | 95K 180T 198L 240S | 95K 156T 159V 227E |
| 105N 156K 159V 179N | 95K 179N 227E 240S | 95K 156T 159V 198L |
| 105N 156T 227E 240S | 95K 179N 198L 240S | 95K 156T 159V 180T |
| 105N 156T 198L 227E | 95K 179N 198L 227E | 95K 156T 159V 179N |
| 105N 156T 180T 240S | 95K 179N 180T 240S | 95K 150P 227E 240S |

| | |
|---|---|
| 95K 150P 198L 240S | 95K 105N 156K 179N |
| 95K 150P 198L 227E | 95K 105N 156K 159V |
| 95K 150P 180T 240S | 95K 105N 156T 240S |
| 95K 150P 180T 227E | 95K 105N 156T 227E |
| 95K 150P 180T 198L | 95K 105N 156T 198L |
| 95K 150P 179N 240S | 95K 105N 156T 180T |
| 95K 150P 179N 227E | 95K 105N 156T 179N |
| 95K 150P 179N 198L | 95K 105N 156T 159V |
| 95K 150P 179N 180T | 95K 105N 150P 240S |
| 95K 150P 159V 240S | 95K 105N 150P 227E |
| 95K 150P 159V 227E | 95K 105N 150P 198L |
| 95K 150P 159V 198L | 95K 105N 150P 180T |
| 95K 150P 159V 180T | 95K 105N 150P 179N |
| 95K 150P 159V 179N | 95K 105N 150P 159V |
| 95K 150P 156K 240S | 95K 105N 150P 156K |
| 95K 150P 156K 227E | 95K 105N 150P 156T |
| 95K 150P 156K 198L | 95K 105N 179N 227E |
| 95K 150P 156K 180T | 95K 105N 179N 198L |
| 95K 150P 156K 179N | 95K 105N 179N 180T |
| 95K 150P 156K 159V | 95K 105N 159V 240S |
| 95K 150P 156T 240S | 156K 159V 179N 198L 227E |
| 95K 150P 156T 227E | 179N 180T 198L 227E 240S |
| 95K 150P 156T 198L | 159V 180T 198L 227E 240S |
| 95K 150P 156T 180T | 159V 179N 198L 227E 240S |
| 95K 150P 156T 179N | 159V 179N 180T 227E 240S |
| 95K 150P 156T 159V | 159V 179N 180T 198L 240S |
| 95K 105N 227E 240S | 159V 179N 180T 198L 227E |
| 95K 105N 198L 240S | 156K 180T 198L 227E 240S |
| 95K 105N 198L 227E | 156K 179N 198L 227E 240S |
| 95K 105N 180T 240S | 156K 179N 180T 227E 240S |
| 95K 105N 180T 227E | 156K 179N 180T 198L 240S |
| 95K 105N 180T 198L | 156K 179N 180T 198L 227E |
| 95K 105N 179N 240S | 156K 159V 198L 227E 240S |
| 95K 156T 180T 227E | 156K 159V 180T 227E 240S |
| 95K 156T 180T 198L | 156K 159V 180T 198L 240S |
| 95K 156T 179N 240S | 156K 159V 180T 198L 227E |
| 95K 156T 179N 227E | 156K 159V 179N 227E 240S |
| 95K 105N 159V 227E | 156K 159V 179N 198L 240S |
| 95K 105N 159V 198L | 150P 156K 159V 198L 227E |
| 95K 105N 159V 180T | 156K 159V 179N 180T 240S |
| 95K 105N 159V 179N | 156K 159V 179N 180T 227E |
| 95K 105N 156K 240S | 156K 159V 179N 180T 198L |
| 95K 105N 156K 227E | 156T 180T 198L 227E 240S |
| 95K 105N 156K 198L | 156T 179N 198L 227E 240S |
| 95K 105N 156K 180T | 156T 179N 180T 227E 240S |
| 156T 179N 180T 198L 240S | 150P 156K 159V 179N 180T |
| 156T 179N 180T 198L 227E | 150P 156T 198L 227E 240S |
| 156T 159V 198L 227E 240S | 150P 156T 180T 227E 240S |
| 156T 159V 180T 227E 240S | 150P 156T 180T 198L 240S |
| 156T 159V 180T 198L 240S | 150P 156T 180T 198L 227E |
| 156T 159V 180T 198L 227E | 150P 156T 179N 227E 240S |
| 156T 159V 179N 227E 240S | 150P 156T 179N 198L 240S |
| 156T 159V 179N 198L 240S | 150P 156T 179N 198L 227E |
| 156T 159V 179N 198L 227E | 150P 156T 179N 180T 240S |
| 156T 159V 179N 180T 240S | 150P 156T 179N 180T 227E |
| 156T 159V 179N 180T 227E | 150P 156T 179N 180T 198L |
| 156T 159V 179N 180T 198L | 150P 156T 159V 227E 240S |
| 150P 180T 198L 227E 240S | 150P 156T 159V 198L 240S |
| 150P 179N 198L 227E 240S | 150P 156T 159V 198L 227E |
| 150P 179N 180T 227E 240S | 150P 156T 159V 180T 240S |
| 150P 179N 180T 198L 240S | 150P 156T 159V 180T 227E |
| 150P 179N 180T 198L 227E | 150P 156T 159V 180T 198L |
| 150P 159V 198L 227E 240S | 150P 156T 159V 179N 240S |
| 150P 159V 180T 227E 240S | 150P 156T 159V 179N 227E |
| 150P 159V 180T 198L 240S | 150P 159V 180T 198L 227E |
| 150P 159V 179N 227E 240S | 150P 156T 159V 179N 180T |
| 150P 159V 179N 198L 240S | 105N 180T 198L 227E 240S |
| 150P 159V 179N 198L 227E | 105N 179N 198L 227E 240S |
| 150P 159V 179N 180T 240S | 105N 179N 180T 227E 240S |
| 150P 159V 179N 180T 227E | 105N 179N 180T 198L 240S |
| 150P 159V 179N 180T 198L | 105N 179N 180T 198L 227E |
| 150P 156K 198L 227E 240S | 105N 159V 198L 227E 240S |
| 150P 156K 180T 227E 240S | 105N 159V 180T 227E 240S |
| 150P 156K 180T 198L 240S | 105N 159V 180T 198L 240S |
| 150P 156K 180T 198L 227E | 105N 159V 180T 198L 227E |
| 150P 156K 179N 227E 240S | 105N 159V 179N 227E 240S |
| 150P 156K 179N 198L 240S | 105N 159V 179N 198L 240S |
| 150P 156K 179N 198L 227E | 105N 159V 179N 198L 227E |
| 150P 156K 179N 180T 240S | 105N 159V 179N 180T 240S |
| 150P 156K 179N 180T 227E | 105N 159V 179N 180T 227E |
| 150P 156K 179N 180T 198L | 105N 159V 179N 180T 198L |
| 150P 156K 159V 227E 240S | 105N 156K 198L 227E 240S |
| 150P 156K 159V 198L 240S | 105N 156K 180T 227E 240S |
| 105N 156K 180T 198L 240S | 105N 150P 179N 180T 240S |
| 150P 156K 159V 180T 240S | 105N 156K 180T 198L 227E |
| 150P 156K 159V 180T 227E | 105N 156K 179N 227E 240S |
| 150P 156K 159V 180T 198L | 105N 156K 179N 198L 240S |
| 150P 156K 159V 179N 240S | 105N 156K 179N 198L 227E |
| 150P 156K 159V 179N 227E | 105N 156K 179N 180T 240S |
| 150P 156K 159V 179N 198L | 105N 156K 179N 180T 227E |
| 105N 156K 179N 180T 198L | 105N 150P 159V 180T 227E |
| 105N 156K 159V 227E 240S | 105N 150P 159V 180T 198L |
| 105N 156K 159V 198L 240S | 105N 150P 159V 179N 240S |
| 105N 156K 159V 198L 227E | 105N 150P 159V 179N 227E |
| 105N 156K 159V 180T 240S | 105N 150P 159V 179N 198L |
| 105N 156K 159V 180T 227E | 105N 150P 159V 179N 180T |
| 105N 156K 159V 180T 198L | 105N 150P 156K 227E 240S |
| 105N 156K 159V 179N 240S | 105N 150P 156K 198L 240S |
| 105N 156K 159V 179N 227E | 105N 150P 156K 198L 227E |
| 105N 156K 159V 179N 198L | 105N 150P 156K 180T 240S |
| 105N 156K 159V 179N 180T | 105N 150P 156K 180T 227E |
| 105N 156T 198L 227E 240S | 105N 150P 156K 180T 198L |
| 105N 156T 180T 227E 240S | 105N 150P 156K 179N 240S |
| 105N 156T 180T 198L 240S | 105N 150P 156K 179N 227E |
| 105N 156T 180T 198L 227E | 105N 150P 156K 179N 198L |
| 105N 156T 179N 227E 240S | 105N 150P 156K 179N 180T |
| 105N 156T 179N 198L 240S | 105N 150P 156K 159V 240S |
| 105N 156T 179N 198L 227E | 105N 150P 156K 159V 227E |
| 105N 156T 179N 180T 240S | 105N 150P 156K 159V 198L |
| 150P 156T 159V 179N 198L | 105N 156T 179N 180T 227E |
| 105N 156T 179N 180T 198L | 105N 150P 156K 159V 179N |
| 105N 156T 159V 227E 240S | 105N 150P 156T 227E 240S |
| 105N 156T 159V 198L 240S | 105N 150P 156T 198L 240S |
| 105N 156T 159V 198L 227E | 105N 150P 156T 198L 227E |
| 105N 156T 159V 180T 240S | 105N 150P 156T 180T 240S |
| 105N 156T 159V 180T 227E | 105N 150P 156T 180T 227E |
| 105N 156T 159V 180T 198L | 105N 150P 156T 180T 198L |
| 105N 156T 159V 179N 240S | 105N 150P 156T 179N 240S |
| 105N 156T 159V 179N 227E | 105N 150P 156T 179N 227E |
| 105N 156T 159V 179N 198L | 105N 150P 156T 179N 198L |
| 105N 156T 159V 179N 180T | 105N 150P 156T 179N 180T |
| 105N 150P 198L 227E 240S | 105N 150P 156T 159V 240S |
| 105N 150P 180T 227E 240S | 105N 150P 156T 159V 227E |
| 105N 150P 180T 198L 240S | 105N 150P 156T 159V 198L |
| 105N 150P 180T 198L 227E | 105N 150P 156T 159V 180T |
| 105N 150P 179N 227E 240S | 105N 150P 156T 159V 179N |
| 105N 150P 179N 198L 240S | 95K 180T 198L 227E 240S |
| 105N 150P 179N 198L 227E | 95K 179N 198L 227E 240S |
| 95K 179N 180T 227E 240S | 95K 156T 159V 198L 227E |
| 105N 150P 179N 180T 227E | 95K 179N 180T 198L 240S |
| 105N 150P 179N 180T 198L | 95K 179N 180T 198L 227E |
| 105N 150P 159V 227E 240S | 95K 159V 198L 227E 240S |
| 105N 150P 159V 198L 240S | 95K 159V 180T 227E 240S |
| 105N 150P 159V 198L 227E | 95K 159V 180T 198L 240S |
| 105N 150P 159V 180T 240S | 95K 159V 180T 198L 227E |
| 95K 159V 179N 227E 240S | 95K 156T 159V 179N 180T |
| 95K 159V 179N 198L 240S | 95K 150P 198L 227E 240S |
| 95K 159V 179N 198L 227E | 95K 150P 180T 227E 240S |
| 95K 159V 179N 180T 240S | 95K 150P 180T 198L 240S |
| 95K 159V 179N 180T 227E | 95K 150P 180T 198L 227E |
| 95K 159V 179N 180T 198L | 95K 150P 179N 227E 240S |
| 95K 156K 198L 227E 240S | 95K 150P 179N 198L 240S |
| 95K 156K 180T 227E 240S | 95K 150P 179N 198L 227E |
| 95K 156K 180T 198L 240S | 95K 150P 179N 180T 240S |
| 95K 156K 180T 198L 227E | 95K 150P 179N 180T 227E |
| 95K 156K 179N 227E 240S | 95K 150P 179N 180T 198L |
| 95K 156K 179N 198L 240S | 95K 150P 159V 227E 240S |
| 95K 156K 179N 198L 227E | 95K 150P 159V 198L 240S |
| 95K 156K 179N 180T 240S | 95K 150P 159V 198L 227E |
| 95K 156K 179N 180T 227E | 95K 150P 159V 180T 240S |
| 95K 156K 179N 180T 198L | 95K 150P 159V 180T 227E |
| 95K 156K 159V 227E 240S | 95K 150P 159V 180T 198L |
| 95K 156K 159V 198L 240S | 95K 150P 159V 179N 240S |
| 95K 156K 159V 198L 227E | 95K 150P 159V 179N 227E |
| 105N 150P 156K 159V 180T | 95K 156K 159V 180T 240S |
| 95K 156K 159V 180T 227E | 95K 150P 159V 179N 180T |
| 95K 156K 159V 180T 198L | 95K 150P 156K 227E 240S |
| 95K 156K 159V 179N 240S | 95K 150P 156K 198L 240S |
| 95K 156K 159V 179N 227E | 95K 150P 156K 198L 227E |
| 95K 156K 159V 179N 198L | 95K 150P 156K 180T 240S |
| 95K 156K 159V 179N 180T | 95K 150P 156K 180T 227E |
| 95K 156T 198L 227E 240S | 95K 150P 156K 180T 198L |
| 95K 156T 180T 227E 240S | 95K 150P 156K 179N 240S |
| 95K 156T 180T 198L 240S | 95K 150P 156K 179N 227E |
| 95K 156T 180T 198L 227E | 95K 150P 156K 179N 198L |
| 95K 156T 179N 227E 240S | 95K 150P 156K 179N 180T |
| 95K 156T 179N 198L 240S | 95K 150P 156K 159V 240S |
| 95K 156T 179N 198L 227E | 95K 150P 156K 159V 227E |
| 95K 156T 179N 180T 240S | 95K 150P 156K 159V 198L |
| 95K 156T 179N 180T 227E | 95K 150P 156K 159V 180T |
| 95K 156T 179N 180T 198L | 95K 150P 156K 159V 179N |
| 95K 156T 159V 227E 240S | 95K 150P 156T 227E 240S |
| 95K 156T 159V 198L 240S | 95K 150P 156T 198L 240S |
| 95K 150P 156T 198L 227E | 95K 105N 156K 159V 198L |
| 95K 156T 159V 180T 240S | 95K 150P 156T 180T 240S |
| 95K 156T 159V 180T 227E | 95K 150P 156T 180T 227E |
| 95K 156T 159V 180T 198L | 95K 150P 156T 180T 198L |
| 95K 156T 159V 179N 240S | 95K 150P 156T 179N 240S |
| 95K 156T 159V 179N 227E | 95K 150P 156T 179N 227E |
| 95K 156T 159V 179N 198L | 95K 150P 156T 179N 198L |
| 95K 150P 156T 179N 180T | 95K 105N 156T 180T 227E |
| 95K 150P 156T 159V 240S | 95K 105N 156T 180T 198L |
| 95K 150P 156T 159V 227E | 95K 105N 156T 179N 240S |
| 95K 150P 156T 159V 198L | 95K 105N 156T 179N 227E |
| 95K 150P 156T 159V 180T | 95K 105N 156T 179N 198L |
| 95K 150P 156T 159V 179N | 95K 105N 156T 179N 180T |
| 95K 105N 198L 227E 240S | 95K 105N 156T 159V 240S |
| 95K 105N 180T 227E 240S | 95K 105N 156T 159V 227E |
| 95K 105N 180T 198L 240S | 95K 105N 156T 159V 198L |
| 95K 105N 180T 198L 227E | 95K 105N 156T 159V 180T |
| 95K 105N 179N 227E 240S | 95K 105N 156T 159V 179N |
| 95K 105N 179N 198L 240S | 95K 105N 150P 227E 240S |
| 95K 105N 179N 198L 227E | 95K 105N 150P 198L 240S |
| 95K 105N 179N 180T 240S | 95K 105N 150P 198L 227E |
| 95K 105N 179N 180T 227E | 95K 105N 150P 180T 240S |
| 95K 105N 179N 180T 198L | 95K 105N 150P 180T 227E |
| 95K 105N 159V 227E 240S | 95K 105N 150P 180T 198L |
| 95K 105N 159V 198L 240S | 95K 105N 150P 179N 240S |
| 95K 105N 159V 198L 227E | 95K 105N 150P 179N 227E |
| 95K 150P 159V 179N 198L | 95K 105N 159V 180T 240S |
| 95K 105N 159V 180T 227E | 95K 105N 150P 179N 180T |
| 95K 105N 159V 180T 198L | 95K 105N 150P 159V 240S |
| 95K 105N 159V 179N 240S | 95K 105N 150P 159V 227E |
| 95K 105N 159V 179N 227E | 95K 105N 150P 159V 198L |
| 95K 105N 159V 179N 198L | 95K 105N 150P 159V 180T |
| 95K 105N 159V 179N 180T | 95K 105N 150P 159V 179N |
| 95K 105N 156K 227E 240S | 95K 105N 150P 156K 240S |
| 95K 105N 156K 198L 240S | 95K 105N 150P 156K 227E |
| 95K 105N 156K 198L 227E | 95K 105N 150P 156K 198L |
| 95K 105N 156K 180T 240S | 95K 105N 150P 156K 180T |
| 95K 105N 156K 180T 227E | 95K 105N 150P 156K 179N |
| 95K 105N 156K 180T 198L | 95K 105N 150P 156K 159V |
| 95K 105N 156K 179N 240S | 95K 105N 150P 156T 240S |
| 95K 105N 156K 179N 227E | 95K 105N 150P 156T 227E |
| 95K 105N 156K 179N 198L | 95K 105N 150P 156T 198L |
| 95K 105N 156K 179N 180T | 95K 105N 150P 156T 180T |
| 95K 105N 156K 159V 240S | 95K 105N 150P 156T 179N |
| 95K 105N 156K 159V 227E | 95K 105N 150P 156T 159V |
| 95K 105N 150P 179N 198L | 150P 156T 159V 179N 198L 240S |
| 95K 105N 156K 159V 180T | 159V 179N 180T 198L 227E 240S |
| 95K 105N 156K 159V 179N | 156K 179N 180T 198L 227E 240S |
| 95K 105N 156T 227E 240S | 156K 159V 180T 198L 227E 240S |
| 95K 105N 156T 198L 240S | 156K 159V 179N 198L 227E 240S |
| 95K 105N 156T 198L 227E | 156K 159V 179N 180T 227E 240S |
| 95K 105N 156T 180T 240S | 156K 159V 179N 180T 198L 240S |
| 150P 156T 159V 179N 198L 227E | 105N 159V 179N 198L 227E 240S |
| 150P 156T 159V 179N 180T 240S | 105N 159V 179N 180T 227E 240S |
| 150P 156T 159V 179N 180T 227E | 105N 159V 179N 180T 198L 240S |
| 150P 156T 159V 179N 180T 198L | 105N 159V 179N 180T 198L 227E |
| 105N 179N 180T 198L 227E 240S | 105N 156K 180T 198L 227E 240S |
| 105N 159V 180T 198L 227E 240S | 105N 156K 179N 198L 227E 240S |
| 156K 159V 179N 180T 198L 227E | 105N 156K 179N 180T 227E 240S |
| 156T 179N 180T 198L 227E 240S | 105N 156K 179N 180T 198L 240S |
| 156T 159V 180T 198L 227E 240S | 105N 156K 179N 180T 198L 227E |
| 156T 159V 179N 198L 227E 240S | 105N 156K 159V 198L 227E 240S |
| 156T 159V 179N 180T 227E 240S | 105N 156K 159V 180T 227E 240S |
| 156T 159V 179N 180T 198L 240S | 105N 156K 159V 180T 198L 240S |
| 156T 159V 179N 180T 198L 227E | 105N 156K 159V 180T 198L 227E |
| 150P 179N 180T 198L 227E 240S | 105N 156K 159V 179N 227E 240S |
| 150P 159V 180T 198L 227E 240S | 105N 156K 159V 179N 198L 240S |
| 150P 159V 179N 198L 227E 240S | 105N 156K 159V 179N 198L 227E |
| 150P 159V 179N 180T 227E 240S | 105N 156K 159V 179N 180T 240S |
| 150P 159V 179N 180T 198L 240S | 105N 156K 159V 179N 180T 227E |
| 150P 159V 179N 180T 198L 227E | 105N 156K 159V 179N 180T 198L |
| 150P 156K 180T 198L 227E 240S | 105N 156T 180T 198L 227E 240S |
| 150P 156K 179N 198L 227E 240S | 105N 156T 179N 198L 227E 240S |
| 150P 156K 179N 180T 227E 240S | 105N 156T 179N 180T 227E 240S |
| 150P 156K 179N 180T 198L 240S | 105N 156T 179N 180T 198L 240S |
| 150P 156K 179N 180T 198L 227E | 105N 156T 179N 180T 198L 227E |
| 150P 156K 159V 198L 227E 240S | 105N 156T 159V 198L 227E 240S |
| 150P 156K 159V 180T 227E 240S | 105N 156T 159V 180T 227E 240S |
| 150P 156K 159V 180T 198L 240S | 105N 156T 159V 180T 198L 240S |
| 150P 156K 159V 180T 198L 227E | 105N 156T 159V 180T 198L 227E |
| 150P 156K 159V 179N 227E 240S | 105N 156T 159V 179N 227E 240S |
| 150P 156K 159V 179N 198L 240S | 105N 156T 159V 179N 198L 240S |
| 150P 156K 159V 179N 198L 227E | 105N 156T 159V 179N 198L 227E |
| 150P 156K 159V 179N 180T 240S | 105N 156T 159V 179N 180T 240S |
| 150P 156K 159V 179N 180T 227E | 105N 156T 159V 179N 180T 227E |
| 150P 156K 159V 179N 180T 198L | 105N 156T 159V 179N 180T 198L |
| 150P 156T 180T 198L 227E 240S | 105N 150P 180T 198L 227E 240S |
| 150P 156T 179N 198L 227E 240S | 105N 150P 179N 198L 227E 240S |
| 150P 156T 179N 180T 227E 240S | 105N 150P 179N 180T 227E 240S |
| 150P 156T 179N 180T 198L 240S | 105N 150P 179N 180T 198L 240S |
| 150P 156T 179N 180T 198L 227E | 105N 150P 156T 159V 180T 227E |
| 150P 156T 159V 198L 227E 240S | 105N 150P 159V 179N 227E 240S |
| 150P 156T 159V 180T 227E 240S | 105N 150P 159V 179N 198L 240S |
| 150P 156T 159V 180T 198L 240S | 105N 150P 159V 179N 198L 227E |
| 150P 156T 159V 180T 198L 227E | 105N 150P 159V 179N 180T 240S |
| 150P 156T 159V 179N 227E 240S | 105N 150P 159V 179N 180T 227E |
| 105N 150P 179N 180T 198L 227E | 105N 150P 159V 179N 180T 198L |
| 105N 150P 156K 198L 227E 240S | 95K 159V 180T 198L 227E 240S |
| 105N 150P 156K 180T 227E 240S | 95K 159V 179N 198L 227E 240S |
| 105N 150P 156K 180T 198L 240S | 95K 159V 179N 180T 227E 240S |
| 105N 150P 156K 180T 198L 227E | 95K 159V 179N 180T 198L 240S |
| 105N 150P 156K 179N 227E 240S | 95K 159V 179N 180T 198L 227E |
| 105N 150P 156K 179N 198L 240S | 95K 156K 180T 198L 227E 240S |
| 105N 150P 156K 179N 198L 227E | 95K 156K 179N 198L 227E 240S |
| 105N 150P 156K 179N 180T 240S | 95K 156K 179N 180T 227E 240S |
| 105N 150P 156K 179N 180T 227E | 95K 156K 179N 180T 198L 240S |
| 105N 150P 156K 179N 180T 198L | 95K 156K 179N 180T 198L 227E |
| 105N 150P 156K 159V 227E 240S | 95K 156K 159V 198L 227E 240S |
| 105N 150P 156K 159V 198L 240S | 95K 156K 159V 180T 227E 240S |
| 105N 150P 156K 159V 198L 227E | 95K 156K 159V 180T 198L 240S |
| 105N 150P 156K 159V 180T 240S | 95K 156K 159V 180T 198L 227E |
| 105N 150P 156K 159V 180T 227E | 95K 156K 159V 179N 227E 240S |
| 105N 150P 156K 159V 180T 198L | 95K 156K 159V 179N 198L 240S |
| 105N 150P 156K 159V 179N 240S | 95K 156K 159V 179N 198L 227E |
| 105N 150P 156K 159V 179N 227E | 95K 156K 159V 179N 180T 240S |
| 105N 150P 156K 159V 179N 198L | 95K 156K 159V 179N 180T 227E |
| 105N 150P 156K 159V 179N 180T | 95K 156K 159V 179N 180T 198L |
| 105N 150P 159V 198L 227E 240S | 95K 156T 180T 198L 227E 240S |
| 105N 150P 159V 180T 227E 240S | 95K 156T 179N 198L 227E 240S |
| 105N 150P 159V 180T 198L 240S | 95K 156T 179N 180T 227E 240S |
| 105N 150P 159V 180T 198L 227E | 95K 156T 179N 180T 198L 240S |
| 105N 150P 156T 198L 227E 240S | 95K 156T 179N 180T 198L 227E |
| 105N 150P 156T 180T 227E 240S | 95K 156T 159V 198L 227E 240S |
| 105N 150P 156T 180T 198L 240S | 95K 156T 159V 180T 227E 240S |
| 105N 150P 156T 180T 198L 227E | 95K 156T 159V 180T 198L 240S |
| 105N 150P 156T 179N 227E 240S | 95K 156T 159V 180T 198L 227E |
| 105N 150P 156T 179N 198L 240S | 95K 156T 159V 179N 227E 240S |
| 105N 150P 156T 179N 198L 227E | 95K 156T 159V 179N 198L 240S |
| 105N 150P 156T 179N 180T 240S | 95K 156T 159V 179N 198L 227E |
| 105N 150P 156T 179N 180T 227E | 95K 156T 159V 179N 180T 240S |
| 105N 150P 156T 179N 180T 198L | 95K 156T 159V 179N 180T 227E |
| 105N 150P 156T 159V 227E 240S | 95K 156T 159V 179N 180T 198L |
| 105N 150P 156T 159V 198L 240S | 95K 150P 180T 198L 227E 240S |
| 105N 150P 156T 159V 198L 227E | 95K 150P 179N 198L 227E 240S |
| 105N 150P 156T 159V 180T 240S | 95K 150P 179N 180T 227E 240S |
| 95K 150P 179N 180T 198L 240S | 95K 150P 156T 159V 180T 240S |
| 105N 150P 156T 159V 180T 198L | 95K 150P 179N 180T 198L 227E |
| 105N 150P 156T 159V 179N 240S | 95K 150P 159V 198L 227E 240S |
| 105N 150P 156T 159V 179N 227E | 95K 150P 159V 180T 227E 240S |
| 105N 150P 156T 159V 179N 198L | 95K 150P 159V 180T 198L 240S |
| 105N 150P 156T 159V 179N 180T | 95K 150P 159V 180T 198L 227E |
| 95K 179N 180T 198L 227E 240S | 95K 150P 159V 179N 227E 240S |
| 95K 150P 159V 179N 198L 240S | 95K 105N 179N 198L 227E 240S |
| 95K 150P 159V 179N 198L 227E | 95K 105N 179N 180T 227E 240S |
| 95K 150P 159V 179N 180T 240S | 95K 105N 179N 180T 198L 240S |
| 95K 150P 159V 179N 180T 227E | 95K 105N 179N 180T 198L 227E |
| 95K 150P 159V 179N 180T 198L | 95K 105N 159V 198L 227E 240S |
| 95K 150P 156K 198L 227E 240S | 95K 105N 159V 180T 227E 240S |
| 95K 150P 156K 180T 227E 240S | 95K 105N 159V 180T 198L 240S |
| 95K 150P 156K 180T 198L 240S | 95K 105N 159V 180T 198L 227E |
| 95K 150P 156K 180T 198L 227E | 95K 105N 159V 179N 227E 240S |
| 95K 150P 156K 179N 227E 240S | 95K 105N 159V 179N 198L 240S |
| 95K 150P 156K 179N 198L 240S | 95K 105N 159V 179N 198L 227E |
| 95K 150P 156K 179N 198L 227E | 95K 105N 159V 179N 180T 240S |
| 95K 150P 156K 179N 180T 240S | 95K 105N 159V 179N 180T 227E |
| 95K 150P 156K 179N 180T 227E | 95K 105N 159V 179N 180T 198L |
| 95K 150P 156K 179N 180T 198L | 95K 105N 156K 198L 227E 240S |
| 95K 150P 156K 159V 227E 240S | 95K 105N 156K 180T 227E 240S |
| 95K 150P 156K 159V 198L 240S | 95K 105N 156K 180T 198L 240S |
| 95K 150P 156K 159V 198L 227E | 95K 105N 156K 180T 198L 227E |
| 95K 150P 156K 159V 180T 240S | 95K 105N 156K 179N 227E 240S |
| 95K 150P 156K 159V 180T 227E | 95K 105N 156K 179N 198L 240S |
| 95K 150P 156K 159V 180T 198L | 95K 105N 156K 179N 198L 227E |
| 95K 150P 156K 159V 179N 240S | 95K 105N 156K 179N 180T 240S |
| 95K 150P 156K 159V 179N 227E | 95K 105N 156K 179N 180T 227E |
| 95K 150P 156K 159V 179N 198L | 95K 105N 156K 179N 180T 198L |
| 95K 150P 156K 159V 179N 180T | 95K 105N 156K 159V 227E 240S |
| 95K 150P 156T 198L 227E 240S | 95K 105N 156K 159V 198L 240S |
| 95K 150P 156T 180T 227E 240S | 95K 105N 156K 159V 198L 227E |
| 95K 150P 156T 180T 198L 240S | 95K 105N 156K 159V 180T 240S |
| 95K 150P 156T 180T 198L 227E | 95K 105N 156K 159V 180T 227E |
| 95K 150P 156T 179N 227E 240S | 95K 105N 156K 159V 180T 198L |
| 95K 150P 156T 179N 198L 240S | 95K 105N 156K 159V 179N 240S |
| 95K 150P 156T 179N 198L 227E | 95K 105N 156K 159V 179N 227E |
| 95K 150P 156T 179N 180T 240S | 95K 105N 156K 159V 179N 198L |
| 95K 150P 156T 179N 180T 227E | 95K 105N 156K 159V 179N 180T |
| 95K 150P 156T 179N 180T 198L | 95K 105N 156T 198L 227E 240S |
| 95K 150P 156T 159V 227E 240S | 95K 105N 156T 180T 227E 240S |
| 95K 150P 156T 159V 198L 240S | 95K 105N 156T 180T 198L 240S |
| 95K 150P 156T 159V 198L 227E | 95K 105N 156T 179N 227E 240S |
| 95K 150P 156T 159V 180T 227E | 95K 105N 156T 179N 198L 240S |
| 95K 150P 156T 159V 180T 198L | 95K 105N 156T 179N 198L 227E |
| 95K 150P 156T 159V 179N 240S | 95K 105N 156T 179N 180T 240S |
| 95K 150P 156T 159V 179N 227E | 95K 105N 156T 179N 180T 227E |
| 95K 150P 156T 159V 179N 198L | 95K 105N 156T 179N 180T 198L |
| 95K 150P 156T 159V 179N 180T | 95K 105N 156T 159V 227E 240S |
| 95K 105N 180T 198L 227E 240S | 95K 105N 156T 159V 198L 240S |

95K 105N 156T 159V 198L 227E
95K 105N 156T 159V 180T 240S
95K 105N 156T 159V 180T 227E
95K 105N 156T 159V 180T 198L
95K 105N 156T 159V 179N 240S
95K 105N 156T 159V 179N 227E
95K 105N 156T 159V 179N 198L
95K 105N 156T 159V 179N 180T
95K 105N 150P 198L 227E 240S
95K 105N 150P 180T 227E 240S
95K 105N 150P 180T 198L 240S
95K 105N 150P 180T 198L 227E
95K 105N 150P 179N 227E 240S
95K 105N 150P 179N 198L 240S
95K 105N 150P 179N 198L 227E
95K 105N 150P 179N 180T 240S
95K 105N 150P 179N 180T 227E
95K 105N 150P 179N 180T 198L
95K 105N 150P 159V 227E 240S
95K 105N 150P 159V 198L 240S
95K 105N 150P 159V 198L 227E
95K 105N 150P 159V 180T 240S
95K 105N 150P 159V 180T 227E
95K 105N 150P 159V 180T 198L
95K 105N 150P 159V 179N 240S
95K 105N 150P 159V 179N 227E
95K 105N 150P 156K 179N 198L
95K 105N 150P 156K 179N 180T
95K 105N 150P 156K 159V 240S
95K 105N 150P 156K 159V 227E
95K 105N 150P 156K 159V 198L
95K 105N 150P 156K 159V 180T
95K 105N 150P 156K 159V 179N
95K 105N 150P 159V 179N 198L
95K 105N 150P 159V 179N 180T
95K 105N 150P 156K 227E 240S
95K 105N 150P 156K 198L 240S
95K 105N 150P 156K 198L 227E
95K 105N 150P 156K 180T 240S
95K 105N 150P 156K 180T 227E
95K 105N 150P 156K 180T 198L
95K 105N 150P 156T 227E 240S
95K 105N 150P 156T 198L 240S
95K 105N 150P 156T 198L 227E
95K 105N 150P 156T 180T 240S
95K 105N 150P 156T 180T 227E
95K 105N 150P 156T 180T 198L
95K 105N 150P 156T 179N 240S
95K 105N 150P 156T 179N 227E
95K 105N 150P 156T 179N 198L
95K 105N 150P 156T 179N 180T
95K 105N 150P 156T 159V 240S
95K 105N 150P 156T 159V 227E
95K 105N 150P 156T 159V 198L
95K 105N 150P 156T 159V 180T
95K 105N 150P 156T 159V 179N
95K 105N 150P 156K 179N 240S
95K 105N 150P 156K 179N 227E
95K 105N 156T 180T 198L 227E
156K 159V 179N 180T 198L 227E 240S
156T 159V 179N 180T 198L 227E 240S
150P 159V 179N 180T 198L 227E 240S
150P 156K 179N 180T 198L 227E 240S
150P 156K 159V 180T 198L 227E 240S
150P 156K 159V 179N 198L 227E 240S
150P 156K 159V 179N 180T 227E 240S
150P 156K 159V 179N 180T 198L 240S
150P 156K 159V 179N 180T 198L 227E
150P 156T 179N 180T 198L 227E 240S
150P 156T 159V 180T 198L 227E 240S
150P 156T 159V 179N 198L 227E 240S
150P 156T 159V 179N 180T 227E 240S
150P 156T 159V 179N 180T 198L 240S
150P 156T 159V 179N 180T 198L 227E
105N 156K 179N 180T 198L 227E 240S
105N 156K 159V 180T 198L 227E 240S
105N 156K 159V 179N 198L 227E 240S
105N 156K 159V 179N 180T 198L 240S
105N 156K 159V 179N 180T 198L 227E
105N 159V 179N 180T 198L 227E 240S
105N 156K 159V 179N 180T 227E 240S
105N 156T 159V 179N 180T 198L 227E
105N 156T 179N 180T 198L 227E 240S
105N 150P 179N 180T 198L 227E 240S
105N 150P 159V 180T 198L 227E 240S
105N 150P 159V 179N 198L 227E 240S
105N 150P 159V 179N 180T 227E 240S
105N 150P 159V 179N 180T 198L 240S
105N 150P 159V 179N 180T 198L 227E
105N 150P 156K 180T 198L 227E 240S
105N 150P 156K 179N 198L 227E 240S
105N 150P 156K 179N 180T 227E 240S
105N 150P 156K 179N 180T 198L 240S
105N 150P 156K 179N 180T 198L 227E
105N 150P 156K 159V 198L 227E 240S
105N 150P 156K 159V 180T 227E 240S
105N 150P 156K 159V 180T 198L 240S
105N 150P 156K 159V 180T 198L 227E
105N 150P 156K 159V 179N 227E 240S
105N 150P 156K 159V 179N 198L 240S
105N 150P 156K 159V 179N 198L 227E
105N 150P 156K 159V 179N 180T 240S
105N 150P 156K 159V 179N 180T 227E
105N 150P 156K 159V 179N 180T 198L
105N 150P 156T 179N 198L 227E 240S
105N 150P 156T 179N 180T 227E 240S
105N 150P 156T 179N 180T 198L 240S
105N 150P 156T 179N 180T 198L 227E
105N 150P 156T 159V 198L 227E 240S
105N 150P 156T 159V 180T 227E 240S
105N 150P 156T 159V 180T 198L 240S
105N 150P 156T 159V 180T 198L 227E
105N 150P 156T 159V 179N 198L 240S
105N 150P 156T 159V 179N 198L 227E
105N 150P 156T 180T 198L 227E 240S
105N 156T 159V 179N 198L 227E 240S
105N 156T 159V 179N 180T 198L 240S
105N 156T 159V 179N 180T 227E 240S
105N 156T 159V 180T 198L 227E 240S
95K 156T 159V 179N 198L 227E 240S
95K 156T 159V 179N 180T 227E 240S
95K 156T 159V 179N 180T 198L 240S
95K 156T 159V 179N 180T 198L 227E
95K 150P 179N 180T 198L 227E 240S
95K 150P 159V 180T 198L 227E 240S
95K 150P 159V 179N 198L 227E 240S
95K 150P 159V 179N 180T 227E 240S
95K 150P 159V 179N 180T 198L 240S
95K 150P 159V 179N 180T 198L 227E
105N 150P 156T 159V 179N 227E 240S
105N 150P 156T 159V 179N 180T 240S
105N 150P 156T 159V 179N 180T 227E
105N 150P 156T 159V 179N 180T 198L
95K 159V 179N 180T 198L 227E 240S
95K 156K 179N 180T 198L 227E 240S
95K 156K 159V 180T 198L 227E 240S
95K 156K 159V 179N 198L 227E 240S
95K 156K 159V 179N 180T 227E 240S
95K 156K 159V 179N 180T 198L 240S
95K 156K 159V 179N 180T 198L 227E
95K 156T 179N 180T 198L 227E 240S
95K 156T 159V 180T 198L 227E 240S
95K 150P 156K 159V 179N 180T 227E
95K 150P 156K 159V 179N 180T 198L
95K 150P 156T 180T 198L 227E 240S
95K 150P 156T 179N 198L 227E 240S
95K 150P 156T 179N 180T 227E 240S
95K 150P 156T 179N 180T 198L 240S
95K 150P 156T 179N 180T 198L 227E
95K 150P 156T 159V 198L 227E 240S
95K 150P 156T 159V 180T 227E 240S
95K 150P 156T 159V 180T 198L 240S
95K 150P 156T 159V 180T 198L 227E
95K 150P 156T 159V 179N 227E 240S
95K 150P 156T 159V 179N 198L 240S
95K 150P 156T 159V 179N 198L 227E
95K 150P 156T 159V 179N 180T 240S
95K 150P 156T 159V 179N 180T 227E
95K 150P 156K 180T 198L 227E 240S
95K 150P 156K 179N 198L 227E 240S
95K 150P 156K 179N 180T 227E 240S
95K 150P 156K 179N 180T 198L 240S
95K 150P 156K 179N 180T 198L 227E
95K 150P 156K 159V 198L 227E 240S
95K 150P 156K 159V 180T 227E 240S
95K 150P 156K 159V 180T 198L 240S
95K 150P 156K 159V 180T 198L 227E
95K 150P 156K 159V 179N 227E 240S
95K 150P 156K 159V 179N 198L 240S
95K 150P 156K 159V 179N 198L 227E
95K 150P 156K 159V 179N 180T 240S
95K 105N 156K 180T 198L 227E 240S
95K 105N 156K 179N 198L 227E 240S
95K 105N 156K 179N 180T 227E 240S
95K 105N 156K 179N 180T 198L 240S
95K 105N 156K 179N 180T 198L 227E
95K 105N 156K 159V 198L 227E 240S
95K 105N 156K 159V 180T 227E 240S
95K 105N 156K 159V 180T 198L 240S
95K 105N 156K 159V 180T 198L 227E
95K 105N 156K 159V 179N 227E 240S
95K 105N 156K 159V 179N 198L 240S
95K 105N 156K 159V 179N 198L 227E
95K 105N 156K 159V 179N 180T 240S
95K 105N 156K 159V 179N 180T 227E
95K 105N 156K 159V 179N 180T 198L
95K 105N 156T 180T 198L 227E 240S
95K 150P 156T 159V 179N 180T 198L
95K 105N 179N 180T 198L 227E 240S
95K 105N 159V 180T 198L 227E 240S
95K 105N 159V 179N 198L 227E 240S
95K 105N 159V 179N 180T 227E 240S
95K 105N 159V 179N 180T 198L 240S
95K 105N 159V 179N 180T 198L 227E
95K 105N 156T 159V 180T 198L 227E
95K 105N 156T 159V 179N 227E 240S
95K 105N 156T 159V 179N 198L 240S
95K 105N 156T 159V 179N 198L 227E
95K 105N 156T 159V 179N 180T 240S
95K 105N 156T 159V 179N 180T 227E
95K 105N 156T 159V 179N 180T 198L
95K 105N 150P 180T 198L 227E 240S
95K 105N 150P 179N 198L 227E 240S
95K 105N 150P 179N 180T 227E 240S
95K 105N 150P 179N 180T 198L 240S
95K 105N 150P 179N 180T 198L 227E
95K 105N 150P 159V 198L 227E 240S
95K 105N 150P 159V 180T 227E 240S
95K 105N 150P 159V 180T 198L 240S
95K 105N 150P 159V 180T 198L 227E
95K 105N 150P 159V 179N 227E 240S
95K 105N 150P 159V 179N 198L 240S
95K 105N 150P 159V 179N 198L 227E
95K 105N 150P 159V 179N 180T 240S
95K 105N 150P 159V 179N 180T 227E
95K 105N 150P 159V 179N 180T 198L
95K 105N 150P 156K 198L 227E 240S
95K 105N 150P 156T 179N 227E 240S
95K 105N 150P 156T 179N 198L 240S
95K 105N 150P 156T 179N 198L 227E
95K 105N 150P 156T 179N 180T 240S
95K 105N 150P 156T 179N 180T 227E
95K 105N 150P 156T 179N 180T 198L
95K 105N 150P 156T 159V 227E 240S
95K 105N 150P 156T 159V 198L 240S
95K 105N 150P 156T 159V 198L 227E
95K 105N 150P 156T 159V 180T 240S
95K 105N 150P 156T 159V 180T 227E
95K 105N 150P 156T 159V 180T 198L
95K 105N 150P 156T 159V 179N 240S
95K 105N 150P 156T 159V 179N 227E
95K 105N 150P 156T 159V 179N 198L
95K 105N 150P 156T 159V 179N 180T
95K 105N 156T 179N 198L 227E 240S
95K 105N 156T 179N 180T 227E 240S
95K 105N 156T 179N 180T 198L 240S
95K 105N 156T 179N 180T 198L 227E
95K 105N 156T 159V 198L 227E 240S
95K 105N 156T 159V 180T 227E 240S
95K 105N 156T 159V 180T 198L 240S
95K 105N 150P 156K 180T 227E 240S
95K 105N 150P 156K 180T 198L 240S
95K 105N 150P 156K 180T 198L 227E
95K 105N 150P 156K 179N 227E 240S
95K 105N 150P 156K 179N 198L 240S
95K 105N 150P 156K 179N 198L 227E
95K 105N 150P 156K 179N 180T 240S
95K 105N 150P 156K 179N 180T 227E
95K 105N 150P 156K 179N 180T 198L
95K 105N 150P 156K 159V 227E 240S
95K 105N 150P 156K 159V 198L 240S
95K 105N 150P 156K 159V 198L 227E
95K 105N 150P 156K 159V 180T 240S
95K 105N 150P 156K 159V 180T 227E
95K 105N 150P 156K 159V 180T 198L
95K 105N 150P 156K 159V 179N 240S
95K 105N 150P 156K 159V 179N 227E
95K 105N 150P 156K 159V 179N 198L
95K 105N 150P 156K 159V 179N 180T
95K 105N 150P 156T 198L 227E 240S
95K 105N 150P 156T 180T 227E 240S
95K 105N 150P 156T 180T 198L 240S
95K 105N 150P 156T 180T 198L 227E
105N 150P 156K 159V 179N 198L 227E 240S
105N 150P 156K 159V 179N 180T 227E 240S
105N 150P 156K 159V 179N 180T 198L 240S
105N 150P 156K 159V 179N 180T 198L 227E
105N 150P 156T 179N 180T 198L 227E 240S
105N 150P 156T 159V 180T 198L 227E 240S
105N 150P 156T 159V 179N 198L 227E 240S
105N 150P 156T 159V 179N 180T 227E 240S
105N 150P 156T 159V 179N 180T 198L 240S
105N 150P 156T 159V 179N 180T 198L 227E
95K 150P 156T 159V 179N 180T 198L 240S
95K 150P 156T 159V 179N 180T 198L 227E
95K 105N 159V 179N 180T 198L 227E 240S
95K 105N 156K 179N 180T 198L 227E 240S
95K 105N 156K 159V 180T 198L 227E 240S
95K 105N 156K 159V 179N 198L 227E 240S
95K 105N 156K 159V 179N 180T 227E 240S
95K 105N 156K 159V 179N 180T 198L 240S
95K 105N 156K 159V 179N 180T 198L 227E
95K 105N 156T 179N 180T 198L 227E 240S
95K 156K 159V 179N 180T 198L 227E 240S
95K 156T 159V 179N 180T 198L 227E 240S
95K 150P 159V 179N 180T 198L 227E 240S
95K 150P 156K 179N 180T 198L 227E 240S
95K 150P 156K 159V 180T 198L 227E 240S
95K 150P 156K 159V 179N 198L 227E 240S
95K 105N 150P 159V 180T 198L 227E 240S
95K 105N 150P 156T 179N 180T 198L 227E
95K 105N 150P 156T 159V 198L 227E 240S
95K 105N 150P 156T 159V 180T 227E 240S
95K 105N 150P 156T 159V 180T 198L 240S
95K 105N 150P 156T 159V 180T 198L 227E
95K 105N 150P 156T 159V 179N 180T 227E
105N 150P 156K 159V 180T 198L 227E 240S
105N 150P 156K 179N 180T 198L 227E 240S
105N 150P 159V 179N 180T 198L 227E 240S
105N 156K 159V 179N 180T 198L 227E 240S
105N 156T 159V 179N 180T 198L 227E 240S
150P 156K 159V 179N 180T 198L 227E 240S
150P 156T 159V 179N 180T 198L 227E 240S
95K 105N 150P 156T 179N 180T 198L 240S
95K 105N 150P 179N 180T 198L 227E 240S
95K 105N 156T 159V 179N 180T 198L 240S
95K 105N 156T 159V 179N 180T 198L 227E
95K 105N 156T 159V 179N 180T 227E 240S
95K 105N 156T 159V 179N 198L 227E 240S
95K 105N 156T 159V 180T 198L 227E 240S
95K 150P 156K 159V 179N 180T 198L 240S
95K 150P 156K 159V 179N 180T 198L 227E
95K 150P 156K 159V 179N 180T 227E 240S
95K 150P 156T 159V 179N 180T 227E 240S
95K 150P 156T 159V 179N 198L 227E 240S
95K 150P 156T 159V 180T 198L 227E 240S
95K 150P 156T 179N 180T 198L 227E 240S
95K 105N 150P 156T 159V 179N 180T 198L
95K 105N 150P 159V 179N 198L 227E 240S
95K 105N 150P 159V 179N 180T 227E 240S
95K 105N 150P 159V 179N 180T 198L 240S
95K 105N 150P 159V 179N 180T 198L 227E
95K 105N 150P 156K 180T 198L 227E 240S
95K 105N 150P 156K 179N 198L 227E 240S
95K 105N 150P 156K 179N 180T 227E 240S
95K 105N 150P 156K 179N 180T 198L 240S
95K 105N 150P 156K 179N 180T 198L 227E
95K 105N 150P 156K 159V 198L 227E 240S
95K 105N 150P 156K 159V 180T 227E 240S
95K 105N 150P 156K 159V 180T 198L 240S
95K 105N 150P 156K 159V 180T 198L 227E
95K 105N 150P 156K 159V 179N 227E 240S
95K 105N 150P 156K 159V 179N 198L 240S
95K 105N 150P 156K 159V 179N 198L 227E
95K 105N 150P 156K 159V 179N 180T 240S
95K 105N 150P 156K 159V 179N 180T 227E
95K 105N 150P 156K 159V 179N 180T 198L
95K 105N 150P 156T 180T 198L 227E 240S
95K 105N 150P 156T 179N 198L 227E 240S
95K 105N 150P 156T 179N 180T 227E 240S
95K 105N 150P 156T 159V 179N 227E 240S
95K 105N 150P 156T 159V 179N 198L 240S
95K 105N 150P 156T 159V 179N 198L 227E
95K 105N 150P 156T 159V 179N 180T 240S
105N 150P 156K 159V 179N 180T 198L 227E 240S
105N 150P 156T 159V 179N 180T 198L 227E 240S
95K 150P 156K 159V 179N 180T 198L 227E 240S
95K 150P 156T 159V 179N 180T 198L 227E 240S
95K 105N 156K 159V 179N 180T 198L 227E 240S
95K 105N 156T 159V 179N 180T 198L 227E 240S
95K 105N 150P 159V 179N 180T 198L 227E 240S
95K 105N 150P 156K 179N 180T 198L 227E 240S
95K 105N 150P 156K 159V 180T 198L 227E 240S
95K 105N 150P 156K 159V 179N 198L 227E 240S
95K 105N 150P 156K 159V 179N 180T 227E 240S
95K 105N 150P 156K 159V 179N 180T 198L 240S
95K 105N 150P 156K 159V 179N 180T 198L 227E
95K 105N 150P 156T 179N 180T 198L 227E 240S
95K 105N 150P 156T 159V 180T 198L 227E 240S
95K 105N 150P 156T 159V 179N 198L 227E 240S
95K 105N 150P 156T 159V 179N 180T 227E 240S
95K 105N 150P 156T 159V 179N 180T 198L 240S
95K 105N 150P 156T 159V 179N 180T 198L 227E
95K 105N 150P 156K 159V 179N 180T 198L 227E 240S
95K 105N 150P 156T 159V 179N 180T 198L 227E 240S

### Example 30

### Reversibility of Enzymatic Activity Following Decrease in Temperature

[0650] In this example, the temperature sensitive hMMP-1 mutants that were confirmed in Example 28B were further assayed to determine whether enzymatic activity at 25° C. was reversible or irreversible following subsequent exposure to elevated temperatures followed by a return to 25° C. The hMMP-1 mutants were expressed in 14 ml culture tubes, as described in Example 28B. The putative Hits were tested for their activities under five conditions: at 25° C., 34° C. or 37° C., and at 34° C. or 37° C. and subsequent re-exposure to the requisite temperature of 25° C. (see Table 16 for reaction conditions). Mutants that were active at 25° C., showed decreased activity when raised to 34° C. or 37° C. (i.e. the ratio of the activities at 25° C./34° C. or 25° C./37° C. is equal to or greater than 1.5), and exhibited a baseline activity when lowered again to 25° C. were scored as “Reversible Hits.” Mutants that were active at 25° C., showed decreased activity when raised to 34° C. or 37° C. (i.e. the ratio of the activities at 25° C./34° C. or 25° C./37° C. is equal to or greater than 1.5), and exhibited the same amount of decreased activity when lowered again to 25° C. were scored as “Irreversible Hits.”

### A. Reaction Conditions

[0651] The reversibility of enzymatic activity of each hMMP-1 mutant was determined using the previously described fluorescence assay as modified below. In short, the 4 ul of the supernatant of each hMMP-1 mutant was diluted in TCNB with 1 mM APMA and transferred to a 96-well plate. Five different wells were prepared for each hMMP-1 mutant as set forth in Table 16. The solution was incubated at the initial reaction temperature (25° C., 34° C., or 37° C.) for 2 hours. This activation step cleaves the pro-peptide and generates mature hMMP-1.

[0652] Following activation, 100 μl of TCNB with 10 μM Mca-K-P-L-G-L-Dpa-A-R-NH₂ fluorescent substrate was added to each well and reaction conditions were as summarized in Table 28, below. Briefly, each hMMP-1 mutant was exposed to each of the five reaction conditions by incubation of the hMMP-1 mutant in the presence of the fluorogenic substrate for an hour at the initial temperature. For each mutant, baseline activity at 25° C., 34° C., or 37° C. was assessed by incubation with the substrate for an additional 1 hour (2 hour condition) or overnight (overnight condition), followed by fluorescence measurement. To assess the reversibility/irreversibility of activity, samples incubated for an initial 1 hour at 34° C., or 37° C. were lowered to 25° C. and allowed to incubate for either an hour (2 hour condition) or 16 hours (overnight condition), followed by fluorescence measurement. Wild-type hMMP-1 was used as a positive control and supernatant from cells transformed with only vector was used as a negative control. Fluorescence was detected by measuring fluorescence in a fluorescent plate reader at 320 nm exitation/405 nm emission. Relative fluorescence units (RFU) were determined. Duplicate reactions were performed for each sample, reaction temperature, and positive and negative control.

TABLE 28
Reaction Conditions

| | Initial | Incubation | | |
|---|---|---|---|---|
| Condition | Temperature | at 25° C. | 2 Hours | Overnight |
| 25° C. | 25° C. | — | 2 hours | overnight |
| 34° C. | 34° C. | — | 2 hours | overnight |
| 34° C. to | 34° C. | 25° C. | a) 34° C. for 1 | a) 34° C. for 1 |
| 25° C. | | | hour | hour |
| | | | b) 25° C. for 1 | b) 25° C. for 16 |
| | | | hour | hours |
| 37° C. | 37° C. | — | 2 hours | overnight |
| 37° C. to | 37° C. | 25° C. | a) 37° C. for 1 | a) 37° C. for 1 |
| 25° C. | | | hour | hour |
| | | | b) 25° C. for 1 | b) 25° C. for 16 |
| | | | hour | hours |

B. Results: Partially Reversible hMMP-1 Mutants

[0653] Twenty six hMMP-1 mutants were determined to be partially reversible. Although the activity (in RFU) did not return to baseline activity observed at 25° C., an overall increase in activity was observed when the temperature was returned to 25° C. compared to activity at 34° C. or 37° C. The results are shown in Tables 29-32 below, which list the activities (in RFUs) and the ratios of the activities. Tables 29 and 30 summarize the results of reversibility at 34° C. or 37° C., respectively, of the hMMP-1 partially reversible mutants under the 2 hour condition. Tables 31 and 32 summarize the results of reversibility at 34° C. or 37° C., respectively, of the partially reversible hMMP-1 mutants under the overnight condition. The results are similar under all reaction conditions, temperature and time. The activity at 34° C. or 37° C. overnight is lower than the activity when incubated at 34° C. or 37° C. for one hour then 25° C. overnight. For example, the activity of E180Y at 34° C. is 6080 RFU but its activity at 34° C. then overnight at 25° C. increased to 8570 RFU (see Table 31, below).

TABLE 29
Partially Reversible hMMP-1 mutants (2 Hours, 34° C.)

| | | | | | | Ratio |
|---|---|---|---|---|---|---|
| | | | | RFU | Ratio | 25° C./34 |
| hMMP-1 | SEQ ID | RFU | RFU | 34 to | 25° C./ | to |
| mutation | NO | 25° C. | 34° C. | 25° C. | 34° C. | 25° C. |
| D105A | 340 | 5669.31 | 824.07 | 922.97 | 6.88 | 6.14 |
| D105F | 336 | 2980.00 | 623.89 | 725.03 | 4.78 | 4.11 |
| D105G | 335 | 8821.81 | 2759.24 | 2966.37 | 3.20 | 2.97 |
| D105S | 334 | 9355.63 | 4607.18 | 6681.63 | 2.03 | 1.40 |
| D105T | 333 | 4457.16 | 974.63 | 1534.71 | 4.57 | 2.90 |
| R150P | 345 | 8750.30 | 2315.11 | 2506.15 | 3.78 | 3.49 |
| G159T | 359 | 6704.95 | 2294.40 | 2344.57 | 2.92 | 2.86 |
| E180Y | 374 | 8557.09 | 4979.24 | 6224.87 | 1.72 | 1.37 |
| E180T | 373 | 7870.99 | 1532.35 | 1852.46 | 5.14 | 4.25 |
| E180F | 377 | 8508.13 | 3597.75 | 3915.71 | 2.36 | 2.17 |
| T185H | 389 | 5593.77 | 2278.26 | 2429.05 | 2.46 | 2.30 |
| T185Q | 391 | 7006.87 | 2250.58 | 2397.60 | 3.11 | 2.92 |
| T185A | 395 | 2474.96 | 663.82 | 822.83 | 3.73 | 3.01 |
| T185E | 388 | 3948.43 | 2088.15 | 1862.83 | 1.89 | 2.12 |
| N187R | 398 | 3006.08 | 1352.97 | 1343.94 | 2.22 | 2.24 |
| N187M | 402 | 4934.44 | 1811.35 | 1793.14 | 2.72 | 2.75 |
| N187K | 397 | 4182.49 | 2425.34 | 2415.57 | 1.72 | 1.73 |
| R195V | 411 | 4847.81 | 2724.92 | 2517.49 | 1.78 | 1.93 |
| A198L | 416 | 6756.76 | 2056.50 | 2046.15 | 3.29 | 3.30 |
| A198M | 415 | 3777.50 | 1708.61 | 1725.14 | 2.21 | 2.19 |
| S210V | 419 | 3349.95 | 1249.47 | 1622.57 | 2.68 | 2.06 |
| Y218S | 421 | 2878.50 | 2373.98 | 2187.48 | 1.21 | 1.32 |
| F223E | 422 | 8318.70 | 3685.68 | 5283.08 | 2.26 | 1.57 |
| V227W | 437 | 996.55 | 729.20 | 834.38 | 1.37 | 1.19 |
| L229I | 441 | 2790.27 | 1050.86 | 1738.46 | 2.66 | 1.61 |
| I240C | 448 | 2688.75 | 561.91 | 884.15 | 4.78 | 3.04 |

TABLE 30
Partially Reversible hMMP-1 mutants (2 Hours, 37° C.)

| | | | | | | Ratio |
|---|---|---|---|---|---|---|
| | | | | RFU | Ratio | 25° C./37 |
| hMMP-1 | SEQ ID | RFU | RFU | 37 to | 25° C./ | to |
| mutation | NO | 25° C. | 37° C. | 25° C. | 37° C. | 25° C. |
| D105A | 340 | 5669.31 | 1336.14 | 1509.52 | 4.24 | 3.76 |
| D105F | 336 | 2980.00 | 818.63 | 1004.23 | 3.64 | 2.97 |
| D105G | 335 | 8821.81 | 4313.40 | 4643.53 | 2.05 | 1.90 |
| D105S | 334 | 9355.63 | 7274.97 | 7453.42 | 1.29 | 1.26 |
| D105T | 333 | 4457.16 | 2220.03 | 2177.84 | 2.01 | 2.05 |
| R150P | 345 | 8750.30 | 2497.86 | 3115.73 | 3.50 | 2.81 |
| G159T | 359 | 6704.95 | 2347.74 | 2530.78 | 2.86 | 2.65 |
| E180Y | 374 | 8557.09 | 6079.36 | 6421.56 | 1.41 | 1.33 |
| E180T | 373 | 7870.99 | 1794.15 | 1824.99 | 4.39 | 4.31 |
| E180F | 377 | 8508.13 | 3975.22 | 3981.79 | 2.14 | 2.14 |
| T185H | 389 | 5593.77 | 2534.15 | 2693.25 | 2.21 | 2.08 |
| T185Q | 391 | 7006.87 | 2642.74 | 2589.77 | 2.65 | 2.71 |
| T185A | 395 | 2474.96 | 707.09 | 730.58 | 3.50 | 3.39 |
| T185E | 388 | 3948.43 | 2091.32 | 2106.55 | 1.89 | 1.87 |
| N187R | 398 | 3006.08 | 1421.87 | 1476.42 | 2.11 | 2.04 |
| N187M | 402 | 4934.44 | 1893.07 | 1998.97 | 2.61 | 2.47 |
| N187K | 397 | 4182.49 | 2652.79 | 2902.79 | 1.58 | 1.44 |
| R195V | 411 | 4847.81 | 2984.10 | 3555.03 | 1.62 | 1.36 |
| A198L | 416 | 6756.76 | 2642.76 | 2540.07 | 2.56 | 2.66 |
| A198M | 415 | 3777.50 | 2155.58 | 2802.78 | 1.75 | 1.35 |
| S210V | 419 | 3349.95 | 2314.86 | 2277.32 | 1.45 | 1.47 |
| Y218S | 421 | 2878.50 | 2350.27 | 2383.67 | 1.22 | 1.21 |
| F223E | 422 | 8318.70 | 6209.93 | 7415.02 | 1.34 | 1.12 |
| V227W | 437 | 996.55 | 787.87 | 850.67 | 1.26 | 1.17 |
| L229I | 441 | 2790.27 | 1803.44 | 2453.07 | 1.55 | 1.14 |
| I240C | 448 | 2688.75 | 853.66 | 872.62 | 3.15 | 3.08 |

TABLE 31
Partially Reversible hMMP-1 mutants (Overnight, 34° C.)

| | | | | | | Ratio |
|---|---|---|---|---|---|---|
| | | | | RFU | Ratio | 25° C./34 |
| hMMP-1 | SEQ ID | RFU | RFU | 34 to | 25° C./ | to |
| mutation | NO | 25° C. | 34° C. | 25° C. | 34° C. | 25° C. |
| D105A | 340 | 8466.62 | 1302.84 | 1532.38 | 6.50 | 5.53 |
| D105F | 336 | 6725.59 | 938.60 | 1172.86 | 7.17 | 5.73 |
| D105G | 335 | 8940.06 | 3560.75 | 5314.44 | 2.51 | 1.68 |
| D105S | 334 | 9300.85 | 5584.70 | 9413.56 | 1.67 | 0.99 |
| D105T | 333 | 7910.47 | 1899.25 | 3254.16 | 4.17 | 2.43 |
| R150P | 345 | 9011.11 | 3533.16 | 4443.96 | 2.55 | 2.03 |
| G159T | 359 | 9105.95 | 3210.57 | 4179.05 | 2.84 | 2.18 |
| E180Y | 374 | 9281.77 | 6080.89 | 8570.48 | 1.53 | 1.08 |
| E180T | 373 | 8475.04 | 2585.89 | 3901.87 | 3.28 | 2.17 |
| E180F | 377 | 9360.74 | 5183.25 | 7022.64 | 1.81 | 1.33 |
| T185H | 389 | 8531.85 | 3164.69 | 5520.76 | 2.70 | 1.55 |
| T185Q | 391 | 9044.23 | 3639.00 | 5467.27 | 2.49 | 1.65 |
| T185A | 395 | 6156.97 | 1110.68 | 1585.53 | 5.54 | 3.88 |
| T185E | 388 | 8479.18 | 3868.06 | 4836.97 | 2.19 | 1.75 |
| N187R | 398 | 7593.11 | 2415.63 | 3156.74 | 3.14 | 2.41 |
| N187M | 402 | 8605.76 | 2769.52 | 4008.68 | 3.11 | 2.15 |
| N187K | 397 | 8667.36 | 3458.94 | 5465.35 | 2.51 | 1.59 |
| R195V | 411 | 8634.05 | 4648.03 | 5966.81 | 1.86 | 1.45 |
| A198L | 416 | 8795.36 | 3469.36 | 5027.30 | 2.54 | 1.75 |
| A198M | 415 | 8352.73 | 3215.69 | 4220.51 | 2.60 | 1.98 |
| S210V | 419 | 7104.17 | 2441.96 | 3664.23 | 2.91 | 1.94 |
| Y218S | 421 | 7740.61 | 4057.37 | 5769.79 | 1.91 | 1.34 |
| F223E | 422 | 9650.44 | 4849.58 | 9311.40 | 1.99 | 1.04 |
| V227W | 437 | 3070.92 | 1370.13 | 1632.51 | 2.24 | 1.88 |
| L229I | 441 | 7333.92 | 1832.18 | 4427.24 | 4.00 | 1.66 |
| I240C | 448 | 6170.51 | 1174.96 | 2389.06 | 5.25 | 2.58 |

TABLE 32
Partially Reversible hMMP-1 mutants (Overnight, 37° C.)

| | | | | | | Ratio |
|---|---|---|---|---|---|---|
| | | | | RFU | Ratio | 25° C./37 |
| hMMP-1 | SEQ ID | RFU | RFU | 37 to | 25° C./ | to |
| mutation | NO | 25° C. | 37° C. | 25° C. | 37° C. | 25° C. |
| D105A | 340 | 8466.62 | 1931.17 | 2589.08 | 4.38 | 3.27 |
| D105F | 336 | 6725.59 | 1173.23 | 1759.31 | 5.73 | 3.82 |
| D105G | 335 | 8940.06 | 5390.32 | 7139.57 | 1.66 | 1.25 |
| D105S | 334 | 9300.85 | 8234.95 | 8615.33 | 1.13 | 1.08 |
| D105T | 333 | 7910.47 | 3292.01 | 4482.74 | 2.40 | 1.76 |
| R150P | 345 | 9011.11 | 3559.66 | 5181.30 | 2.53 | 1.74 |
| G159T | 359 | 9105.95 | 3160.07 | 4338.35 | 2.88 | 2.10 |
| E180Y | 374 | 9281.77 | 6894.61 | 8986.47 | 1.35 | 1.03 |
| E180T | 373 | 8475.04 | 2809.15 | 3649.72 | 3.02 | 2.32 |
| E180F | 377 | 9360.74 | 5335.15 | 7183.36 | 1.75 | 1.30 |
| T185H | 389 | 8531.85 | 3515.59 | 6101.91 | 2.43 | 1.40 |
| T185Q | 391 | 9044.23 | 4012.93 | 5623.60 | 2.25 | 1.61 |
| T185A | 395 | 6156.97 | 1059.61 | 1315.46 | 5.81 | 4.68 |
| T185E | 388 | 8479.18 | 3892.33 | 5330.81 | 2.18 | 1.59 |
| N187R | 398 | 7593.11 | 2370.01 | 3425.18 | 3.20 | 2.22 |
| N187M | 402 | 8605.76 | 2720.28 | 4400.27 | 3.16 | 1.96 |
| N187K | 397 | 8667.36 | 3709.62 | 6374.32 | 2.34 | 1.36 |
| R195V | 411 | 8634.05 | 4960.91 | 7212.05 | 1.74 | 1.20 |
| A198L | 416 | 8795.36 | 4181.78 | 5395.22 | 2.10 | 1.63 |
| A198M | 415 | 8352.73 | 3637.79 | 5914.49 | 2.30 | 1.41 |
| S210V | 419 | 7104.17 | 3939.90 | 4626.58 | 1.80 | 1.54 |
| Y218S | 421 | 7740.61 | 4093.29 | 6181.92 | 1.89 | 1.25 |
| F223E | 422 | 9650.44 | 7645.34 | 9149.09 | 1.26 | 1.05 |
| V227W | 437 | 3070.92 | 1456.45 | 1695.81 | 2.11 | 1.81 |
| L229I | 441 | 7333.92 | 3268.93 | 5729.00 | 2.24 | 1.28 |
| I240C | 448 | 6170.51 | 2223.23 | 2050.31 | 2.78 | 3.01 |

C. Results: Non Reversible hMMP-1 Mutants

[0654] Thirty eight hMMP-1 mutants were determined to be non reversible. The activity of these mutants at 34° C. or 37° C., which is decreased compared to the activity at 25° C., remained decreased when lowered to 25° C. The results are shown in Tables 33-36 below, which list the activities (in RFUs) and the ratios of the activities. Tables 33 and 34 summarize the results or at 34° C. or 37° C., respectively, of the hMMP-1 irreversible mutants under the two hour condition. Tables 35 and 36 summarize the results of reversibility at 34° C. or 37° C., respectively, of the irreversible hMMP-1 mutants under the overnight condition. The results are similar under all reaction conditions, temperature and time. The activity at 34° C. or 37° C. overnight is the same or similar to the activity when incubated at 34° C. or 37° C. for one hour then 25° C. overnight. For example, the activity of D105R at 34° C. is 1407 RFU and its activity at 34° C. then overnight at 25° C. is 1424 RFU (see Table 35, below).

TABLE 33
Non Reversible hMMP-1 mutants (2 Hours, 34° C.)

| | | | | | | Ratio |
|---|---|---|---|---|---|---|
| | | | | RFU | Ratio | 25° C./34 |
| hMMP-1 | SEQ ID | RFU | RFU | 34 to | 25° C./ | to |
| mutation | NO | 25° C. | 34° C. | 25° C. | 34° C. | 25° C. |
| L95K | 328 | 4650.42 | 748.29 | 833.29 | 6.21 | 5.58 |
| D105I | 338 | 6832.34 | 780.32 | 908.39 | 8.76 | 7.52 |
| D105L | 339 | 4206.38 | 534.24 | 630.66 | 7.87 | 6.67 |
| D105N | 332 | 8920.05 | 918.13 | 1128.03 | 9.72 | 7.91 |
| D105R | 331 | 2821.20 | 722.46 | 843.19 | 3.90 | 3.35 |
| D105W | 337 | 6663.80 | 1690.93 | 2266.26 | 3.94 | 2.94 |
| D151G | 346 | 1264.62 | 589.27 | 664.86 | 2.15 | 1.90 |
| F155A | 348 | 2824.01 | 779.72 | 735.02 | 3.62 | 3.84 |
| D156K | 350 | 8576.47 | 2210.63 | 2318.28 | 3.88 | 3.70 |
| D156T | 352 | 8727.27 | 2679.17 | 2770.95 | 3.26 | 3.15 |
| D156L | 356 | 2916.24 | 576.84 | 655.46 | 5.06 | 4.45 |
| D156A | 357 | 2299.63 | 533.68 | 635.67 | 4.31 | 3.62 |
| D156W | 354 | 1502.86 | 539.74 | 637.12 | 2.78 | 2.36 |
| D156V | 355 | 1593.06 | 534.71 | 634.83 | 2.98 | 2.51 |
| D156H | 349 | 5387.79 | 698.77 | 784.55 | 7.71 | 6.87 |
| D156R | 351 | 7020.81 | 793.83 | 881.39 | 8.84 | 7.97 |
| G159V | 363 | 4673.44 | 856.78 | 789.92 | 5.45 | 5.92 |
| A176F | 365 | 1609.85 | 654.43 | 633.13 | 2.46 | 2.54 |
| D179N | 368 | 5660.69 | 644.51 | 644.98 | 8.78 | 8.78 |
| D181L | 382 | 2710.97 | 619.39 | 645.65 | 4.38 | 4.20 |
| D181K | 378 | 1130.63 | 625.01 | 609.58 | 1.81 | 1.85 |
| E182T | 384 | 3702.08 | 791.23 | 805.48 | 4.68 | 4.60 |
| E182Q | 383 | 1331.50 | 639.84 | 623.88 | 2.08 | 2.13 |
| T185R | 390 | 2637.31 | 1187.63 | 1158.47 | 2.22 | 2.28 |
| N187F | 401 | 3227.96 | 877.21 | 823.16 | 3.68 | 3.92 |
| N187I | 404 | 4218.55 | 849.11 | 869.19 | 4.97 | 4.85 |
| G206A | 418 | 872.27 | 603.01 | 592.13 | 1.45 | 1.47 |
| G206S | 417 | 932.69 | 492.65 | 507.75 | 1.89 | 1.84 |
| V227C | 433 | 1998.67 | 950.01 | 1115.17 | 2.10 | 1.79 |
| V227E | 430 | 7904.54 | 839.00 | 906.06 | 9.42 | 8.72 |
| Q228P | 439 | 1082.56 | 607.78 | 617.33 | 1.78 | 1.75 |
| L229T | 440 | 1221.05 | 580.15 | 605.83 | 2.10 | 2.02 |
| D233E | 443 | 2195.02 | 1393.95 | 1332.07 | 1.57 | 1.65 |
| I234A | 447 | 2375.42 | 1473.70 | 1456.58 | 1.61 | 1.63 |
| I234T | 446 | 1199.18 | 713.83 | 775.40 | 1.68 | 1.55 |
| I234E | 444 | 3920.02 | 705.86 | 829.15 | 5.55 | 4.73 |
| I240S | 449 | 3867.71 | 973.97 | 1027.84 | 3.97 | 3.76 |

TABLE 34
Non Reversible hMMP-1 mutants (2 Hours, 37° C.)

| | | | | | | Ratio |
|---|---|---|---|---|---|---|
| | | | | RFU | Ratio | 25° C./37 |
| hMMP-1 | SEQ ID | RFU | RFU | 37 to | 25° C./ | to |
| mutation | NO | 25° C. | 37° C. | 25° C. | 37° C. | 25° C. |
| L95K | 328 | 4650.42 | 746.89 | 1092.61 | 6.23 | 4.26 |
| D105I | 338 | 6832.34 | 1110.07 | 1104.96 | 6.15 | 6.18 |
| D105L | 339 | 4206.38 | 607.46 | 624.88 | 6.92 | 6.73 |
| D105N | 332 | 8920.05 | 1727.44 | 1820.97 | 5.16 | 4.90 |
| D105R | 331 | 2821.20 | 813.68 | 846.09 | 3.47 | 3.33 |
| D105W | 337 | 6663.80 | 3081.59 | 3123.49 | 2.16 | 2.13 |
| D151G | 346 | 1264.62 | 616.51 | 628.65 | 2.05 | 2.01 |
| F155A | 348 | 2824.01 | 746.59 | 867.76 | 3.78 | 3.25 |
| D156K | 350 | 8576.47 | 2310.30 | 2080.22 | 3.71 | 4.12 |
| D156T | 352 | 8727.27 | 2752.35 | 2251.21 | 3.17 | 3.88 |
| D156L | 356 | 2916.24 | 688.08 | 652.06 | 4.24 | 4.47 |
| D156A | 357 | 2299.63 | 554.21 | 606.45 | 4.15 | 3.79 |
| D156W | 354 | 1502.86 | 575.12 | 582.43 | 2.61 | 2.58 |
| D156V | 355 | 1593.06 | 542.36 | 544.49 | 2.94 | 2.93 |
| D156H | 349 | 5387.79 | 819.82 | 881.23 | 6.57 | 6.11 |
| D156R | 351 | 7020.81 | 872.40 | 944.17 | 8.05 | 7.44 |
| G159V | 363 | 4673.44 | 838.46 | 932.14 | 5.57 | 5.01 |
| A176F | 365 | 1609.85 | 618.72 | 741.21 | 2.60 | 2.17 |
| D179N | 368 | 5660.69 | 656.31 | 636.18 | 8.63 | 8.90 |
| D181L | 382 | 2710.97 | 611.92 | 668.31 | 4.43 | 4.06 |
| D181K | 378 | 1130.63 | 608.68 | 646.77 | 1.86 | 1.75 |
| E182T | 384 | 3702.08 | 826.28 | 746.25 | 4.48 | 4.96 |
| E182Q | 383 | 1331.50 | 623.11 | 629.01 | 2.14 | 2.12 |
| T185R | 390 | 2637.31 | 1183.37 | 1158.87 | 2.23 | 2.28 |
| N187F | 401 | 3227.96 | 931.04 | 856.03 | 3.47 | 3.77 |
| N187I | 404 | 4218.55 | 887.80 | 879.78 | 4.75 | 4.80 |
| G206A | 418 | 872.27 | 586.57 | 654.37 | 1.49 | 1.33 |
| G206S | 417 | 932.69 | 463.60 | 552.97 | 2.01 | 1.69 |
| V227C | 433 | 1998.67 | 992.19 | 1130.51 | 2.01 | 1.77 |
| V227E | 430 | 7904.54 | 1015.12 | 1127.74 | 7.79 | 7.01 |
| Q228P | 439 | 1082.56 | 586.63 | 777.28 | 1.85 | 1.39 |
| L229T | 440 | 1221.05 | 564.49 | 747.87 | 2.16 | 1.63 |
| D233E | 443 | 2195.02 | 1454.71 | 1976.42 | 1.51 | 1.11 |
| I234A | 447 | 2375.42 | 1594.08 | 1460.23 | 1.49 | 1.63 |
| I234T | 446 | 1199.18 | 796.81 | 833.55 | 1.50 | 1.44 |
| I234E | 444 | 3920.02 | 923.57 | 867.78 | 4.24 | 4.52 |
| I240S | 449 | 3867.71 | 1575.05 | 1594.10 | 2.46 | 2.43 |

TABLE 35
Non Reversible hMMP-1 mutants (Overnight, 34° C.)

| | | | | | | Ratio |
|---|---|---|---|---|---|---|
| | | | | RFU | Ratio | 25° C./34 |
| hMMP-1 | SEQ ID | RFU | RFU | 34 to | 25° C./ | to |
| mutation | NO | 25° C. | 34° C. | 25° C. | 34° C. | 25° C. |
| L95K | 328 | 7744.34 | 1803.12 | 1892.59 | 4.29 | 4.09 |
| D105I | 338 | 8394.32 | 1614.57 | 1736.52 | 5.20 | 4.83 |
| D105L | 339 | 6546.78 | 957.95 | 988.23 | 6.83 | 6.62 |
| D105N | 332 | 9119.04 | 1459.16 | 1822.40 | 6.25 | 5.00 |
| D105R | 331 | 5775.25 | 1407.06 | 1424.59 | 4.10 | 4.05 |
| D105W | 337 | 8617.36 | 2851.22 | 4709.94 | 3.02 | 1.83 |
| D151G | 346 | 1956.65 | 959.80 | 1013.03 | 2.04 | 1.93 |
| F155A | 348 | 4891.89 | 2016.76 | 1493.70 | 2.43 | 3.28 |
| D156K | 350 | 8696.27 | 3968.92 | 4371.25 | 2.19 | 1.99 |
| D156T | 352 | 8972.20 | 3971.43 | 4480.62 | 2.26 | 2.00 |
| D156L | 356 | 5254.55 | 972.64 | 1011.27 | 5.40 | 5.20 |
| D156A | 357 | 3585.37 | 1098.25 | 1057.84 | 3.26 | 3.39 |
| D156W | 354 | 2570.24 | 1091.27 | 1126.01 | 2.36 | 2.28 |
| D156V | 355 | 2208.99 | 954.21 | 954.54 | 2.31 | 2.31 |
| D156H | 349 | 7587.19 | 1451.49 | 1440.25 | 5.23 | 5.27 |
| D156R | 351 | 8622.23 | 1735.02 | 1760.60 | 4.97 | 4.90 |
| G159V | 363 | 6555.27 | 1821.53 | 1524.05 | 3.60 | 4.30 |
| A176F | 365 | 4191.69 | 1414.21 | 1181.99 | 2.96 | 3.55 |
| D179N | 368 | 7317.57 | 1504.84 | 1458.70 | 4.86 | 5.02 |
| D181L | 382 | 4534.34 | 1078.98 | 984.43 | 4.20 | 4.61 |
| D181K | 378 | 1869.47 | 946.27 | 841.77 | 1.98 | 2.22 |
| E182T | 384 | 6752.25 | 1483.52 | 1570.77 | 4.55 | 4.30 |
| E182Q | 383 | 2212.75 | 1065.07 | 929.49 | 2.08 | 2.38 |
| T185R | 390 | 6281.97 | 2425.71 | 2808.30 | 2.59 | 2.24 |
| N187F | 401 | 7352.85 | 1612.23 | 1533.32 | 4.56 | 4.80 |
| N187I | 404 | 8306.40 | 1459.25 | 1598.90 | 5.69 | 5.20 |
| G206A | 418 | 2492.53 | 1038.14 | 906.63 | 2.40 | 2.75 |
| G206S | 417 | 2845.84 | 908.82 | 816.00 | 3.13 | 3.49 |
| V227C | 433 | 5833.84 | 2207.20 | 2739.65 | 2.64 | 2.13 |
| V227E | 430 | 8630.90 | 2283.07 | 2096.30 | 3.78 | 4.12 |
| Q228P | 439 | 3673.33 | 1162.95 | 1213.48 | 3.16 | 3.03 |
| L229T | 440 | 3543.75 | 1103.34 | 1105.90 | 3.21 | 3.20 |
| D233E | 443 | 6694.93 | 2570.71 | 3171.20 | 2.60 | 2.11 |
| I234A | 447 | 6250.56 | 3890.90 | 3608.10 | 1.61 | 1.73 |
| I234T | 446 | 3507.08 | 1099.58 | 1194.99 | 3.19 | 2.93 |
| I234E | 444 | 7541.73 | 1365.08 | 1817.16 | 5.52 | 4.15 |
| I240S | 449 | 4376.99 | 2108.15 | 2290.56 | 2.08 | 1.91 |

TABLE 36
Non Reversible hMMP-1 mutants (Overnight, 37° C.)

| | | | | | | Ratio |
|---|---|---|---|---|---|---|
| | | | | RFU | Ratio | 25° C./37 |
| hMMP-1 | SEQ ID | RFU | RFU | 37 to | 25° C./ | to |
| mutation | NO | 25° C. | 37° C. | 25° C. | 37° C. | 25° C. |
| L95K | 328 | 7744.34 | 1677.96 | 2463.18 | 4.62 | 3.14 |
| D105I | 338 | 8394.32 | 1958.96 | 1925.73 | 4.29 | 4.36 |
| D105L | 339 | 6546.78 | 1070.51 | 939.53 | 6.12 | 6.97 |
| D105N | 332 | 9119.04 | 2347.74 | 2813.87 | 3.88 | 3.24 |
| D105R | 331 | 5775.25 | 1499.57 | 1312.01 | 3.85 | 4.40 |
| D105W | 337 | 8617.36 | 4593.06 | 5698.08 | 1.88 | 1.51 |
| D151G | 346 | 1956.65 | 1097.68 | 900.59 | 1.78 | 2.17 |
| F155A | 348 | 4891.89 | 1843.31 | 1882.95 | 2.65 | 2.60 |
| D156K | 350 | 8696.27 | 3858.90 | 4126.13 | 2.25 | 2.11 |
| D156T | 352 | 8972.20 | 3854.84 | 3990.29 | 2.33 | 2.25 |
| D156L | 356 | 5254.55 | 1232.94 | 1008.08 | 4.26 | 5.21 |
| D156A | 357 | 3585.37 | 1110.73 | 940.62 | 3.23 | 3.81 |
| D156W | 354 | 2570.24 | 1206.22 | 997.15 | 2.13 | 2.58 |
| D156V | 355 | 2208.99 | 997.64 | 777.35 | 2.21 | 2.84 |
| D156H | 349 | 7587.19 | 1763.27 | 1536.01 | 4.30 | 4.94 |
| D156R | 351 | 8622.23 | 1846.71 | 1764.13 | 4.67 | 4.89 |
| G159V | 363 | 6555.27 | 1683.20 | 1842.91 | 3.89 | 3.56 |
| A176F | 365 | 4191.69 | 1336.32 | 1553.01 | 3.14 | 2.70 |
| D179N | 368 | 7317.57 | 1485.28 | 1378.59 | 4.93 | 5.31 |
| D181L | 382 | 4534.34 | 1000.80 | 1020.08 | 4.53 | 4.45 |
| D181K | 378 | 1869.47 | 928.55 | 895.45 | 2.01 | 2.09 |
| E182T | 384 | 6752.25 | 1496.55 | 1319.53 | 4.51 | 5.12 |
| E182Q | 383 | 2212.75 | 1035.24 | 916.32 | 2.14 | 2.41 |
| T185R | 390 | 6281.97 | 2300.61 | 2829.34 | 2.73 | 2.22 |
| N187F | 401 | 7352.85 | 1704.23 | 1533.08 | 4.31 | 4.80 |
| N187I | 404 | 8306.40 | 1465.77 | 1560.83 | 5.67 | 5.32 |
| G206A | 418 | 2492.53 | 974.96 | 1057.32 | 2.56 | 2.36 |
| G206S | 417 | 2845.84 | 808.42 | 908.44 | 3.52 | 3.13 |
| V227C | 433 | 5833.84 | 2432.82 | 2707.71 | 2.40 | 2.15 |
| V227E | 430 | 8630.90 | 2152.81 | 2615.26 | 4.01 | 3.30 |
| Q228P | 439 | 3673.33 | 1081.32 | 1681.57 | 3.40 | 2.18 |
| L229T | 440 | 3543.75 | 1030.05 | 1488.58 | 3.44 | 2.38 |
| D233E | 443 | 6694.93 | 2661.43 | 4531.45 | 2.52 | 1.48 |
| I234A | 447 | 6250.56 | 4043.80 | 3433.03 | 1.55 | 1.82 |
| I234T | 446 | 3507.08 | 1228.23 | 1397.18 | 2.86 | 2.51 |
| I234E | 444 | 7541.73 | 1901.96 | 1783.16 | 3.97 | 4.23 |
| I240S | 449 | 4376.99 | 2592.19 | 3417.53 | 1.69 | 1.28 |

### Example 31

### Proteolytic Activity of hMMP-1 on Insoluble Collagen

[0655] In this example, the collagenase activity of hMMP-1 was assessed for the protein substrate collagen using SDS-PAGE analysis. Wildtype hMMP-1 cleaves insoluble collagen (α1(I) and α2(I) chains) into three-quarter and one-quarter length digestion products. In this assay, a fluorescein isothiocyanate (FITC)-conjugated collagen was used as the substrate and the reaction was monitored by SDS-PAGE of the reaction products. Cleavage of α1(I) and α2(I) collagen chains results in three-quarter and one-quarter length digestion products which are distinguishable from full length collagen by separation on SDS polyacrylamide gels. Alternatively, cleavage was assessed by fluorometric analysis. A similar assay can be used to assess the activity of mutant hMMPs for cleavage activity at 25° C. versus 34° C. or 37° C.

[0656] A. SDS-PAGE Analysis

[0657] In short, 2 μg of hMMP-1 (purchased from R&D Systems, #901-MP; or BAP006_{—}2 and BAP006_{—}10 purified as described in Example 27) was diluted in TCNB containing 1 mM AMPA and incubated at the reaction temperature (25° C. or 37° C.) for 2 hours. This activation step cleaves the pro-peptide and generates mature hMMP-1. Subsequently, 6 μg of insoluble collagen conjugated to fluorescein isothiocyanate (FITC) (Anaspec #85111 or Sigma Collagen #C4361) in 20 μl TCNB was added to each activated hMMP-1 aliquot and the mixture was incubated at 25° C. or 37° C. for 24 hours or 6 days.

[0658] Cleavage of the insoluble collagen was observed by SDS/PAGE. The reaction mixture was separated on a 7.5% SDS polyacrylamide gel and visualized by staining with Coomassie Blue dye. SDS/PAGE results show that after 24 hours incubation at 25° C. or 37° C., hMMP-1 partially cleaved the α1(I) and α2(I) collagen chains into ¾ and ¼ length digestion products for all hMMP-1 proteins tested. After 6 days at 25° C., complete cleavage into ¾ and ¼ length digestion products was observed. After 6 days at 37° C., the collagen was digested completely. The ¾ and ¼ length collagen digestion products are thermally unstable at body temperature.

[0659] B. Fluorometic Analysis

[0660] Alternatively, collagenase activity was measured using a fluorescence assay. 5 μg hMMP-1 (purchased from R&D Systems, #901-MP; or BAP006_{—}2 and BAP006_{—}10 purified as described in Example 27) was diluted in TCNB containing 1 mM AMPA to a final concentration and incubated at 37° C. for 2 hours. The activity of hMMP-1 for FITC-labeled collagen (Sigma #C4361 or Elastin #CF308) was assessed using a protocol adapted from Baici A et al. (1980) Anal. Biochem., 108: 230-232). Briefly, hMMP-1 was incubated with the substrate for 144 hours at 37° C. As a negative control, the substrate was incubated with buffer only. Following incubation, the reaction mixture was first centrifuged to remove insoluble particles. Fluorescence of the supernatant was detected by measuring fluorescence in a fluorescent plate reader at 495 nm excitation/520 nm emission. Relative fluorescence units (RFU) were determined. Duplicate reactions were performed for each sample.

[0661] The results (see Tables 37 and 38 below) show that incubation of insoluble collagen with wildtype hMMP-1 at 37° C. for 144 hours resulted in cleavage of collagen as indicated by high RFU values compared to buffer only control. For example, for cleavage of collagen from Sigma, all hMMPs tested had an RFU between about 1000.00-1200.00 compared to buffer only with an RFU value of about 400.00. The activity of purified collagens from CHO-S (BAP006_{—}2) and BL21 cells (BAP006_{—}10) for cleavage of Sigma insoluble collagen was comparable to hMMP-1 purchased from R&D systems. For cleavage of Elastin collagen, the activity of recombinant hMMP-1 purchased from R&D and BAP006_{—}10 were about 3000.00 RFU, while the activity of BAP006_{—}2 was about 2000.00 RFU. Buffer only exhibited a background fluorescence for cleavage of Elastin collagen of about 1500.00 RFU.

TABLE 37
Cleavage of Collagen (Sigma Insoluble Substrate)

| hMMP-1 | 37° C. | 37° C. | Avg 37° C. | St Dev |
|---|---|---|---|---|
| R&D systems | 1163.17 | 1137.81 | 1150.49 | 17.93 |
| Buffer only | 481.49 | 490.57 | 486.03 | 6.42 |
| BAP006_2 (CHO) | 1265.61 | 1275.17 | 1270.39 | 6.76 |
| BAP006_10 (BL21) | 1292.36 | 1335.14 | 1313.75 | 30.25 |

TABLE 38
Cleavage of Collagen (Elastin Insoluble Substrate)

| hMMP-1 | 37° C. | 37° C. | Avg 37° C. | St Dev |
|---|---|---|---|---|
| R&D systems | 3488.224 | 2981.417 | 3235.32 | 357.66 |
| Buffer only | 1312.511 | 1807.479 | 1560.00 | 350.00 |
| BAP006_2 (CHO) | 1729.757 | 2297.573 | 2013.67 | 401.51 |
| BAP006_10 (BL21) | 2669.758 | 3056.381 | 2863.07 | 273.38 |

[0662] Since modifications will be apparent to those of skill in this art, it is intended that this invention be limited only by the scope of the appended claims.

The application's sequence listing, which the Patent Office published only in electronic form, follows.

SEQUENCE LISTING (537 sequences)

SEQ ID NO: 1 - protein, 220 aa, Homo sapiens
  Cathepsin L mature
  cathepsin L1 heavy chain 1-175
  cathepsin L1 light chain 179-220
APRSVDWREKGYVTPVKNQGQCGSCWAFSATGALEGQMFRKTGRLISLSEQNLVDCSGPQGNEGCNGGLMDYAFQYVQDNGGLDSEESYPYEATEESCKYNPKYSVANDTGFVDIPKQEKALMKAVATVGPISVAIDAGHESFLFYKEGIYFEPDCSSEDMDHGVLVVGYGFESTESDNNKYWLVKNSWGEEWGMGGYVKMAKDRRNHCGIASAASYPTV

SEQ ID NO: 2 - protein, 22 aa, Homo sapiens
  kappa IgG heterologous signal sequence
MDMRVPAQLLGLLLLWLPGARG

SEQ ID NO: 3 - DNA, 1032 bp, Homo sapiens
  Optimized synthetic Cat-L construct with heterologous signal sequence and Nhe1 and BamHI restriction sites
gctagcatggacatgcgcgtacctgctcagttgttggggctcttgctgctgtggttgcccggggcacgtgggactctgaccttcgaccattcactggaggcccagtggactaagtggaaggctatgcataatcgactttacggcatgaacgaggagggttggcggcgggctgtgtgggagaagaatatgaaaatgatcgaactgcataaccaggaatacagagagggcaagcacagttttaccatggcaatgaatgcatttggggacatgactagcgaggaatttcggcaagtgatgaatggtttccagaatcgcaagccaagaaaagggaaggtcttccaggagcccctcttctacgaggcccctcgtagtgtcgactggcgggagaaaggctacgtgacaccagtcaaaaaccagggccaatgcggctcctgctgggcattttctgccaccggtgctctggaaggacaaatgttcaggaagactggccgtctcatctccttgtccgaacagaacctggtggactgctccgggccacaggggaatgaggggtgcaacggggggcttatggactacgccttccagtacgtgcaggataatgggggtctcgattccgaggaatcctacccctacgaagcaactgaggaatcttgcaagtataaccctaagtattccgtggcaaatgatactggcttcgtggatatccctaaacaggaaaaggccctcatgaaggccgtagccaccgtgggccccatctctgtcgcaattgacgctggtcacgagtctttcctcttctataaggaaggtatatactttgaacccgattgcagcagtgaggacatggatcatggcgtactcgtcgtcgggtatggttttgagagtaccgaatcagataataataaatattggctggtgaaaaacagctggggtgaggagtggggtatgggtggctacgtcaagatggccaaggaccgtaggaaccattgtggtatcgcatctgctgcatcttatcccactgtgtaatagggatcc

SEQ ID NO: 4 - protein, 338 aa, Homo sapiens
  Optimized synthetic Cat-L construct with heterologous signal sequence
MDMRVPAQLLGLLLLWLPGARGTLTFDHSLEAQWTKWKAMHNRLYGMNEEGWRRAVWEKNMKMIELHNQEYREGKHSFTMAMNAFGDMTSEEFRQVMNGFQNRKPRKGKVFQEPLFYEAPRSVDWREKGYVTPVKNQGQCGSCWAFSATGALEGQMFRKTGRLISLSEQNLVDCSGPQGNEGCNGGLMDYAFQYVQDNGGLDSEESYPYEATEESCKYNPKYSVANDTGFVDIPKQEKALMKAVATVGPISVAIDAGHESFLFYKEGIYFEPDCSSEDMDHGVLVVGYGFESTESDNNKYWLVKNSWGEEWGMGGYVKMAKDRRNHCGIASAASYPTV

SEQ ID NO: 5 - DNA, 6201 bp, Artificial Sequence
  synthetic Cat-L HZ24 expression vector with heterologous signal sequence
tcaatattggccattagccatattattcattggttatatagcataaatcaatattggctattggccattgcatacgttgtatctatatcataatatgtacatttatattggctcatgtccaatatgaccgccatgttggcattgattattgactagttattaatagtaatcaattacggggtcattagttcatagcccatatatggagttccgcgttacataacttacggtaaatggcccgcctggctgaccgcccaacgacccccgcccattgacgtcaataatgacgtatgttcccatagtaacgccaatagggactttccattgacgtcaatgggtggagtatttacggtaaactgcccacttggcagtacatcaagtgtatcatatgccaagtccgccccctattgacgtcaatgacggtaaatggcccgcctggcattatgcccagtacatgaccttacgggactttcctacttggcagtacatctacgtattagtcatcgctattaccatggtgatgcggttttggcagtacaccaatgggcgtggatagcggtttgactcacggggatttccaagtctccaccccattgacgtcaatgggagtttgttttggcaccaaaatcaacgggactttccaaaatgtcgtaataaccccgccccgttgacgcaaatgggcggtaggcgtgtacggtgggaggtctatataagcagagctcgtttagtgaaccgtcagatcactagaagctttattgcggtagtttatcacagttaaattgctaacgcagtcagtgcttctgacacaacagtctcgaacttaagctgcagaagttggtcgtgaggcactgggcaggtaagtatcaaggttacaagacaggtttaaggagaccaatagaaactgggcttgtcgagacagagaagactcttgcgtttctgataggcacctattggtcttactgacatccactttgcctttctctccacaggtgtccactcccagttcaattacagctcttaaggctagagtacttaatacgactcactataggctagcatggacatgcgcgtacctgctcagttgttggggctcttgctgctgtggttgcccggggcacgtgggactctgaccttcgaccattcactggaggcccagtggactaagtggaaggctatgcataatcgactttacggcatgaacgaggagggttggcggcgggctgtgtgggagaagaatatgaaaatgatcgaactgcataaccaggaatacagagagggcaagcacagttttaccatggcaatgaatgcatttggggacatgactagcgaggaatttcggcaagtgatgaatggtttccagaatcgcaagccaagaaaagggaaggtcttccaggagcccctcttctacgaggcccctcgtagtgtcgactggcgggagaaaggctacgtgacaccagtcaaaaaccagggccaatgcggctcctgctgggcattttctgccaccggtgctctggaaggacaaatgttcaggaagactggccgtctcatctccttgtccgaacagaacctggtggactgctccgggccacaggggaatgaggggtgcaacggggggcttatggactacgccttccagtacgtgcaggataatgggggtctcgattccgaggaatcctacccctacgaagcaactgaggaatcttgcaagtataaccctaagtattccgtggcaaatgatactggcttcgtggatatccctaaacaggaaaaggccctcatgaaggccgtagccaccgtgggccccatctctgtcgcaattgacgctggtcacgagtctttcctcttctataaggaaggtatatactttgaacccgattgcagcagtgaggacatggatcatggcgtactcgtcgtcgggtatggttttgagagtaccgaatcagataataataaatattggctggtgaaaaacagctggggtgaggagtggggtatgggtggctacgtcaagatggccaaggaccgtaggaaccattgtggtatcgcatctgctgcatcttatcccactgtgtaatagggatccatagctaacgcccctctccctcccccccccctaacgttactggccgaagccgcttggaataaggccggtgtgcgtttgtctatatgttattttccaccatattgccgtcttttggcaatgtgagggcccggaaacctggccctgtcttcttgacgagcattcctaggggtctttcccctctcgccaaaggaatgcaaggtctgttgaatgtcgtgaaggaagcagttcctctggaagcttcttgaagacaaacaacgtctgtagcgaccctttgcaggcagcggaaccccccacctggcgacaggtgcctctgcggccaaaagccacgtgtataagatacacctgcaaaggcggcacaaccccagtgccacgttgtgagttggatagttgtggaaagagtcaaatggctctcctcaagcgtattcaacaaggggctgaaggatgcccagaaggtaccccattgtatgggatctgatctggggcctcggtgcacatgctttacatgtgtttagtcgaggttaaaaaaacgtctaggccccccgaaccacggggacgtggttttcctttgaaaaacacgatgataagcttgccacaacccacagcggccgctgccatcatggttcgaccattgaactgcatcgtcgccgtgtcccaaaatatggggattggcaagaacggagacctaccctggcctccgctcaggaacgagttcaagtacttccaaagaatgaccacaacctcttcagtggaaggtaaacagaatctggtgattatgggtaggaaaacctggttctccattcctgagaagaatcgacctttaaaggacagaattaatatagttctcagtagagaactcaaagaaccaccacgaggagctcattttcttgccaaaagtttggatgatgccttaagacttattgaacaaccggaattggcaagtaaagtagacatggtttggatagtcggaggcagttctgtttaccaggaagccatgaatcaaccaggccacctcagactctttgtgacaaggatcatgcaggaatttgaaagtgacacgtttttcccagaaattgatttggggaaatataaacttctcccagaatacccaggcgtcctctctgaggtccaggaggaaaaaggcatcaagtataagtttgaagtctacgagaagaaagactaaacgcgtggtacctctagagtcgacctgggcggccgcttcgagcagacatgataagatacattgatgagtttggacaaaccacaactagaatgcagtgaaaaaaatgctttatttgtgaaatttgtgatgctattgctttatttgtaaccattataagctgcaataaacaagttaacaacaacaattgcattcattttatgtttcaggttcagggggagatgtgggaggttttttaaagcaagtaaaacctctacaaatgtggtaaaatcgataagtatccgggctggcgtaatagcgaagaggcccgcaccgatcgcccttcccaacagttgcgcagcctgaatggcgaatggacgcgccctgtagcggcgcattaagcgcggcgggtgtggtggttacgcgcagcgtgaccgctacacttgccagcgccctagcgcccgctcctttcgctttcttcccttcctttctcgccacgttcgccggctttccccgtcaagctctaaatcgggggctccctttagggttccgatttagtgctttacggcacctcgaccccaaaaaacttgattagggtgatggttcacgtagtgggccatcgccctgatagacggtttttcgccctttgacgttggagtccacgttctttaatagtggactcttgttccaaactggaacaacactcaaccctatctcggtctattcttttgatttataagggattttgccgatttcggcctattggttaaaaaatgagctgatttaacaaaaatttaacgcgaattttaacaaaatattaacgcttacaatttcctgatgcggtattttctccttacgcatctgtgcggtatttcacaccgcatatggtgcactctcagtacaatctgctctgatgccgcatagttaagccagccccgacacccgccaacacccgctgacgcgccctgacgggcttgtctgctcccggcatccgcttacagacaagctgtgaccgtctccgggagctgcatgtgtcagaggttttcaccgtcatcaccgaaacgcgcgagacgaaagggcctcgtgatacgcctatttttataggttaatgtcatgataataatggtttcttagacgtcaggtggcacttttcggggaaatgtgcgcggaacccctatttgtttatttttctaaatacattcaaatatgtatccgctcatgagacaataaccctgataaatgcttcaataatattgaaaaaggaagagtatgagtattcaacatttccgtgtcgcccttattcccttttttgcggcattttgccttcctgtttttgctcacccagaaacgctggtgaaagtaaaagatgctgaagatcagttgggtgcacgagtgggttacatcgaactggatctcaacagcggtaagatccttgagagttttcgccccgaagaacgttttccaatgatgagcacttttaaagttctgctatgtggcgcggtattatcccgtattgacgccgggcaagagcaactcggtcgccgcatacactattctcagaatgacttggttgagtactcaccagtcacagaaaagcatcttacggatggcatgacagtaagagaattatgcagtgctgccataaccatgagtgataacactgcggccaacttacttctgacaacgatcggaggaccgaaggagctaaccgcttttttgcacaacatgggggatcatgtaactcgccttgatcgttgggaaccggagctgaatgaagccataccaaacgacgagcgtgacaccacgatgcctgtagcaatggcaacaacgttgcgcaaactattaactggcgaactacttactctagcttcccggcaacaattaatagactggatggaggcggataaagttgcaggaccacttctgcgctcggcccttccggctggctggtttattgctgataaatctggagccggtgagcgtgggtctcgcggtatcattgcagcactggggccagatggtaagccctcccgtatcgtagttatctacacgacggggagtcaggcaactatggatgaacgaaatagacagatcgctgagataggtgcctcactgattaagcattggtaactgtcagaccaagtttactcatatatactttagattgatttaaaacttcatttttaatttaaaaggatctaggtgaagatcctttttgataatctcatgaccaaaatcccttaacgtgagttttcgttccactgagcgtcagaccccgtagaaaagatcaaaggatcttcttgagatcctttttttctgcgcgtaatctgctgcttgcaaacaaaaaaaccaccgctaccagcggtggtttgtttgccggatcaagagctaccaactctttttccgaaggtaactggcttcagcagagcgcagataccaaatactgttcttctagtgtagccgtagttaggccaccacttcaagaactctgtagcaccgcctacatacctcgctctgctaatcctgttaccagtggctgctgccagtggcgataagtcgtgtcttaccgggttggactcaagacgatagttaccggataaggcgcagcggtcgggctgaacggggggttcgtgcacacagcccagcttggagcgaacgacctacaccgaactgagatacctacagcgtgagctatgagaaagcgccacgcttcccgaagggagaaaggcggacaggtatccggtaagcggcagggtcggaacaggagagcgcacgagggagcttccagggggaaacgcctggtatctttatagtcctgtcgggtttcgccacctctgacttgagcgtcgatttttgtgatgctcgtcaggggggcggagcctatggaaaaacgccagcaacgcggcctttttacggttcctggccttttgctggccttttgctcacatggctcgacagatct

SEQ ID NO: 6 - DNA, 1068 bp, Homo sapiens
  Optimized synthetic Cat-L His construct with heterologous signal sequence and restriction sites
gctagcatggacatgcgtgtacctgctcagctgctgggcctgttgctcttgtggcttcccggagcccggggaaccctgacattcgatcactctctggaggcccagtggacaaaatggaaggctatgcacaataggctctacgggatgaatgaggaaggctggagaagggccgtttgggagaagaatatgaaaatgattgagctgcacaaccaggagtaccgagagggaaagcattcctttaccatggcaatgaatgcctttggggacatgacatcagaggagtttcggcaggtgatgaacggatttcagaatagaaagccccgaaaaggcaaagtgttccaagagcccctcttttacgaggccccacgctccgtcgactggcgtgaaaaagggtatgtaactcccgtcaaaaaccagggacagtgcggcagttgttgggccttttctgctaccggggcattggagggccagatgttcaggaagaccggacgtcttatctccctttcagaacagaacctggtcgactgtagcggaccccagggaaacgaggggtgcaatggagggctcatggactatgcatttcagtacgtgcaggacaatggaggcctggattcagaggaatcctacccttacgaggctacagaagaaagctgcaagtataaccctaagtacagcgtcgccaacgacaccgggtttgtcgatattccaaagcaggagaaggccctgatgaaagcagttgccaccgtgggccccatctcagtcgcaattgatgccggccacgagtcttttctgttttataaagaaggtatttactttgagcccgattgcagctctgaagacatggatcacggagtgttggttgtaggctacggcttcgagtccaccgagtcagacaacaataaatactggttggtgaaaaactcctggggggaggagtggggcatgggcggatacgtgaagatggccaaagacagaaggaatcactgtggaatcgcatctgctgccagctatccaactgtaggaggaggcggttcaggtcaccaccaccatcaccactagtgaggatcc

SEQ ID NO: 7 - protein, 350 aa, Homo sapiens [sequence omitted]

SEQ ID NO: 8 - DNA, 6237 bp, Artificial Sequence
  Synthetic Cat-L-His expression vector with heterologous signal sequence
tcaatattggccattagccatattattcattggttatatagcataaatcaatattggctattggccattgcatacgttgtatctatatcataatatgtacatttatattggctcatgtccaatatgaccgccatgttggcattgattattgactagttattaatagtaatcaattacggggtcattagttcatagcccatatatggagttccgcgttacataacttacggtaaatggcccgcctggctgaccgcccaacgacccccgcccattgacgtcaataatgacgtatgttcccatagtaacgccaatagggactttccattgacgtcaatgggtggagtatttacggtaaactgcccacttggcagtacatcaagtgtatcatatgccaagtccgccccctattgacgtcaatgacggtaaatggcccgcctggcattatgcccagtacatgaccttacgggactttcctacttggcagtacatctacgtattagtcatcgctattaccatggtgatgcggttttggcagtacaccaatgggcgtggatagcggtttgactcacggggatttccaagtctccaccccattgacgtcaatgggagtttgttttggcaccaaaatcaacgggactttccaaaatgtcgtaataaccccgccccgttgacgcaaatgggcggtaggcgtgtacggtgggaggtctatataagcagagctcgtttagtgaaccgtcagatcactagaagctttattgcggtagtttatcacagttaaattgctaacgcagtcagtgcttctgacacaacagtctcgaacttaagctgcagaagttggtcgtgaggcactgggcaggtaagtatcaaggttacaagacaggtttaaggagaccaatagaaactgggcttgtcgagacagagaagactcttgcgtttctgataggcacctattggtcttactgacatccactttgcctttctctccacaggtgtccactcccagttcaattacagctcttaaggctagagtacttaatacgactcactataggctagcatggacatgcgtgtacctgctcagctgctgggcctgttgctcttgtggcttcccggagcccggggaaccctgacattcgatcactctctggaggcccagtggacaaaatggaaggctatgcacaataggctctacgggatgaatgaggaaggctggagaagggccgtttgggagaagaatatgaaaatgattgagctgcacaaccaggagtaccgagagggaaagcattcctttaccatggcaatgaatgcctttggggacatgacatcagaggagtttcggcaggtgatgaacggatttcagaatagaaagccccgaaaaggcaaagtgttccaagagcccctcttttacgaggccccacgctccgtcgactggcgtgaaaaagggtatgtaactcccgtcaaaaaccagggacagtgcggcagttgttgggccttttctgctaccggggcattggagggccagatgttcaggaagaccggacgtcttatctccctttcagaacagaacctggtcgactgtagcggaccccagggaaacgaggggtgcaatggagggctcatggactatgcatttcagtacgtgcaggacaatggaggcctggattcagaggaatcctacccttacgaggctacagaagaaagctgcaagtataaccctaagtacagcgtcgccaacgacaccgggtttgtcgatattccaaagcaggagaaggccctgatgaaagcagttgccaccgtgggccccatctcagtcgcaattgatgccggccacgagtcttttctgttttataaagaaggtatttactttgagcccgattgcagctctgaagacatggatcacggagtgttggttgtaggctacggcttcgagtccaccgagtcagacaacaataaatactggttggtgaaaaactcctggggggaggagtggggcatgggcggatacgtgaagatggccaaagacagaaggaatcactgtggaatcgcatctgctgccagctatccaactgtaggaggaggcggttcaggtcaccaccaccatcaccactagtgaggatccatagctaacgcccctctccctcccccccccctaacgttactggccgaagccgcttggaataaggccggtgtgcgtttgtctatatgttattttccaccatattgccgtcttttggcaatgtgagggcccggaaacctggccctgtcttcttgacgagcattcctaggggtctttcccctctcgccaaaggaatgcaaggtctgttgaatgtcgtgaaggaagcagttcctctggaagcttcttgaagacaaacaacgtctgtagcgaccctttgcaggcagcggaaccccccacctggcgacaggtgcctctgcggccaaaagccacgtgtataagatacacctgcaaaggcggcacaaccccagtgccacgttgtgagttggatagttgtggaaagagtcaaatggctctcctcaagcgtattcaacaaggggctgaaggatgcccagaaggtaccccattgtatgggatctgatctggggcctcggtgcacatgctttacatgtgtttagtcgaggttaaaaaaacgtctaggccccccgaaccacggggacgtggttttcctttgaaaaacacgatgataagcttgccacaacccacagcggccgctgccatcatggttcgaccattgaactgcatcgtcgccgtgtcccaaaatatggggattggcaagaacggagacctaccctggcctccgctcaggaacgagttcaagtacttccaaagaatgaccacaacctcttcagtggaaggtaaacagaatctggtgattatgggtaggaaaacctggttctccattcctgagaagaatcgacctttaaaggacagaattaatatagttctcagtagagaactcaaagaaccaccacgaggagctcattttcttgccaaaagtttggatgatgccttaagacttattgaacaaccggaattggcaagtaaagtagacatggtttggatagtcggaggcagttctgtttaccaggaagccatgaatcaaccaggccacctcagactctttgtgacaaggatcatgcaggaatttgaaagtgacacgtttttcccagaaattgatttggggaaatataaacttctcccagaatacccaggcgtcctctctgaggtccaggaggaaaaaggcatcaagtataagtttgaagtctacgagaagaaagactaaacgcgtggtacctctagagtcgacctgggcggccgcttcgagcagacatgataagatacattgatgagtttggacaaaccacaactagaatgcagtgaaaaaaatgctttatttgtgaaatttgtgatgctattgctttatttgtaaccattataagctgcaataaacaagttaacaacaacaattgcattcattttatgtttcaggttcagggggagatgtgggaggttttttaaagcaagtaaaacctctacaaatgtggtaaaatcgataagtatccgggctggcgtaatagcgaagaggcccgcaccgatcgcccttcccaacagttgcgcagcctgaatggcgaatggacgcgccctgtagcggcgcattaagcgcggcgggtgtggtggttacgcgcagcgtgaccgctacacttgccagcgccctagcgcccgctcctttcgctttcttcccttcctttctcgccacgttcgccggctttccccgtcaagctctaaatcgggggctccctttagggttccgatttagtgctttacggcacctcgaccccaaaaaacttgattagggtgatggttcacgtagtgggccatcgccctgatagacggtttttcgccctttgacgttggagtccacgttctttaatagtggactcttgttccaaactggaacaacactcaaccctatctcggtctattcttttgatttataagggattttgccgatttcggcctattggttaaaaaatgagctgatttaacaaaaatttaacgcgaattttaacaaaatattaacgcttacaatttcctgatgcggtattttctccttacgcatctgtgcggtatttcacaccgcatatggtgcactctcagtacaatctgctctgatgccgcatagttaagccagccccgacacccgccaacacccgctgacgcgccctgacgggcttgtctgctcccggcatccgcttacagacaagctgtgaccgtctccgggagctgcatgtgtcagaggttttcaccgtcatcaccgaaacgcgcgagacgaaagggcctcgtgatacgcctatttttataggttaatgtcatgataataatggtttcttagacgtcaggtggcacttttcggggaaatgtgcgcggaacccctatttgtttatttttctaaatacattcaaatatgtatccgctcatgagacaataaccctgataaatgcttcaataatattgaaaaaggaagagtatgagtattcaacatttccgtgtcgcccttattcccttttttgcggcattttgccttcctgtttttgctcacccagaaacgctggtgaaagtaaaagatgctgaagatcagttgggtgcacgagtgggttacatcgaactggatctcaacagcggtaagatccttgagagttttcgccccgaagaacgttttccaatgatgagcacttttaaagttctgctatgtggcgcggtattatcccgtattgacgccgggcaagagcaactcggtcgccgcatacactattctcagaatgacttggttgagtactcaccagtcacagaaaagcatcttacggatggcatgacagtaagagaattatgcagtgctgccataaccatgagtgataacactgcggccaacttacttctgacaacgatcggaggaccgaaggagctaaccgcttttttgcacaacatgggggatcatgtaactcgccttgatcgttgggaaccggagctgaatgaagccataccaaacgacgagcgtgacaccacgatgcctgtagcaatggcaacaacgttgcgcaaactattaactggcgaactacttactctagcttcccggcaacaattaatagactggatggaggcggataaagttgcaggaccacttctgcgctcggcccttccggctggctggtttattgctgataaatctggagccggtgagcgtgggtctcgcggtatcattgcagcactggggccagatggtaagccctcccgtatcgtagttatctacacgacggggagtcaggcaactatggatgaacgaaatagacagatcgctgagataggtgcctcactgattaagcattggtaactgtcagaccaagtttactcatatatactttagattgatttaaaacttcatttttaatttaaaaggatctaggtgaagatcctttttgataatctcatgaccaaaatcccttaacgtgagttttcgttccactgagcgtcagaccccgtagaaaagatcaaaggatcttcttgagatcctttttttctgcgcgtaatctgctgcttgcaaacaaaaaaaccaccgctaccagcggtggtttgtttgccggatcaagagctaccaactctttttccgaaggtaactggcttcagcagagcgcagataccaaatactgttcttctagtgtagccgtagttaggccaccacttcaagaactctgtagcaccgcctacatacctcgctctgctaatcctgttaccagtggctgctgccagtggcgataagtcgtgtcttaccgggttggactcaagacgatagttaccggataaggcgcagcggtcgggctgaacggggggttcgtgcacacagcccagcttggagcgaacgacctacaccgaactgagatacctacagcgtgagctatgagaaagcgccacgcttcccgaagggagaaaggcggacaggtatccggtaagcggcagggtcggaacaggagagcgcacgagggagcttccagggggaaacgcctggtatctttatagtcctgtcgggtttcgccacctctgacttgagcgtcgatttttgtgatgctcgtcaggggggcggagcctatggaaaaacgccagcaacgcggcctttttacggttcctggccttttgctggccttttgctcacatggctcgacagatct

SEQ ID NO: 9 - protein, 333 aa, Homo sapiens
  Human Cat-L protein containing heterologous secretory signal
MDPTLILAAFCLGIASATLTFDHSLEAQWTKWKAMHNRLYGMNEEGWRRAVWEKNMKMIELHNQEYREGKHSFTMAMNAFGDMTSEEFRQVMNGFQNRKPRKGKVFQEPLFYEAPRSVDWREKGYVTPVKNQGQCGSCWAFSATGALEGQMFRKTGRLISLSEQNLVDCSGPQGNEGCNGGLMDYAFQYVQDNGGLDSEESYPYEATEESCKYNPKYSVANDTGFVDIPKQEKALMKAVATVGPISVAIDAGHESFLFYKEGIYFEPDCSSEDMDHGVLVVGYGFESTESDNNKYWLVKNSWGEEWGMGGYVKMAKDRRNHCGIASAASYPTV

SEQ ID NO: 10 - DNA, 1002 bp, Homo sapiens
  Sequenced cDNA of Cat-L insert (BATJ)
atggatcctacactcatccttgctgccttttgcctgggaattgcctcagctactctaacatttgatcacagtttagaggcacagtggaccaagtggaaggcgatgcacaacagattatacggcatgaatgaagaaggatggaggagagcagtgtgggagaagaacatgaagatgattgaactgcacaatcaggaatacagggaagggaaacacagcttcacaatggccatgaacgcctttggagacatgaccagtgaagaattcaggcaggtgatgaatggctttcaaaaccgtaagcccaggaaggggaaagtgttccaggaacctctgttttatgaggcccccagatctgtggattggagagagaaaggctacgtgactcctgtgaagaatcagggtcagtgtggttcttgttgggcttttagtgctactggtgctcttgaaggacagatgttccggaaaactgggaggcttatctcactgagtgagcagaatctggtagactgctctgggcctcaaggcaatgaaggctgcaatggtggcctaatggattatgctttccagtatgttcaggataatggaggcctggactctgaggaatcctatccatatgaggcaacagaagaatcctgtaagtacaatcccaagtattctgttgctaatgacaccggctttgtggacatccctaagcaggagaaggccctgatgaaggcagttgcaactgtggggcccatttctgttgctattgatgcaggtcatgagtccttcctgttctataaagaaggcatttattttgagccagactgtagcagtgaagacatggatcatggtgtgctggtggttggctacggatttgaaagcacagaatcagataacaataaatattggctggtgaagaacagctggggtgaagaatggggcatgggtggctacgtaaagatggccaaagaccggagaaaccattgtggaattgcctcagcagccagctaccccactgtgtga

SEQ ID NO: 11 - DNA, 6190 bp, Artificial Sequence
  HZ24 expression vector containin Cat-L cDNA
tcaatattggccattagccatattattcattggttatatagcataaatcaatattggctattggccattgcatacgttgtatctatatcataatatgtacatttatattggctcatgtccaatatgaccgccatgttggcattgattattgactagttattaatagtaatcaattacggggtcattagttcatagcccatatatggagttccgcgttacataacttacggtaaatggcccgcctggctgaccgcccaacgacccccgcccattgacgtcaataatgacgtatgttcccatagtaacgccaatagggactttccattgacgtcaatgggtggagtatttacggtaaactgcccacttggcagtacatcaagtgtatcatatgccaagtccgccccctattgacgtcaatgacggtaaatggcccgcctggcattatgcccagtacatgaccttacgggactttcctacttggcagtacatctacgtattagtcatcgctattaccatggtgatgcggttttggcagtacaccaatgggcgtggatagcggtttgactcacggggatttccaagtctccaccccattgacgtcaatgggagtttgttttggcaccaaaatcaacgggactttccaaaatgtcgtaataaccccgccccgttgacgcaaatgggcggtaggcgtgtacggtgggaggtctatataagcagagctcgtttagtgaaccgtcagatcactagaagctttattgcggtagtttatcacagttaaattgctaacgcagtcagtgcttctgacacaacagtctcgaacttaagctgcagaagttggtcgtgaggcactgggcaggtaagtatcaaggttacaagacaggtttaaggagaccaatagaaactgggcttgtcgagacagagaagactcttgcgtttctgataggcacctattggtcttactgacatccactttgcctttctctccacaggtgtccactcccagttcaattacagctcttaaggctagagtacttaatacgactcactataggctagccaccatggatcctacactcatccttgctgccttttgcctgggaattgcctcagctactctaacatttgatcacagtttagaggcacagtggaccaagtggaaggcgatgcacaacagattatacggcatgaatgaagaaggatggaggagagcagtgtgggagaagaacatgaagatgattgaactgcacaatcaggaatacagggaagggaaacacagcttcacaatggccatgaacgcctttggagacatgaccagtgaagaattcaggcaggtgatgaatggctttcaaaaccgtaagcccaggaaggggaaagtgttccaggaacctctgttttatgaggcccccagatctgtggattggagagagaaaggctacgtgactcctgtgaagaatcagggtcagtgtggttcttgttgggcttttagtgctactggtgctcttgaaggacagatgttccggaaaactgggaggcttatctcactgagtgagcagaatctggtagactgctctgggcctcaaggcaatgaaggctgcaatggtggcctaatggattatgctttccagtatgttcaggataatggaggcctggactctgaggaatcctatccatatgaggcaacagaagaatcctgtaagtacaatcccaagtattctgttgctaatgacaccggctttgtggacatccctaagcaggagaaggccctgatgaaggcagttgcaactgtggggcccatttctgttgctattgatgcaggtcatgagtccttcctgttctataaagaaggcatttattttgagccagactgtagcagtgaagacatggatcatggtgtgctggtggttggctacggatttgaaagcacagaatcagataacaataaatattggctggtgaagaacagctggggtgaagaatggggcatgggtggctacgtaaagatggccaaagaccggagaaaccattgtggaattgcctcagcagccagctaccccactgtgtgatgaggatccatagctaacgcccctctccctcccccccccctaacgttactggccgaagccgcttggaataaggccggtgtgcgtttgtctatatgttattttccaccatattgccgtcttttggcaatgtgagggcccggaaacctggccctgtcttcttgacgagcattcctaggggtctttcccctctcgccaaaggaatgcaaggtctgttgaatgtcgtgaaggaagcagttcctctggaagcttcttgaagacaaacaacgtctgtagcgaccctttgcaggcagcggaaccccccacctggcgacaggtgcctctgcggccaaaagccacgtgtataagatacacctgcaaaggcggcacaaccccagtgccacgttgtgagttggatagttgtggaaagagtcaaatggctctcctcaagcgtattcaacaaggggctgaaggatgcccagaaggtaccccattgtatgggatctgatctggggcctcggtgcacatgctttacatgtgtttagtcgaggttaaaaaaacgtctaggccccccgaaccacggggacgtggttttcctttgaaaaacacgatgataagcttgccacaacccacagcggccgctgccatcatggttcgaccattgaactgcatcgtcgccgtgtcccaaaatatggggattggcaagaacggagacctaccctggcctccgctcaggaacgagttcaagtacttccaaagaatgaccacaacctcttcagtggaaggtaaacagaatctggtgattatgggtaggaaaacctggttctccattcctgagaagaatcgacctttaaaggacagaattaatatagttctcagtagagaactcaaagaaccaccacgaggagctcattttcttgccaaaagtttggatgatgccttaagacttattgaacaaccggaattggcaagtaaagtagacatggtttggatagtcggaggcagttctgtttaccaggaagccatgaatcaaccaggccacctcagactctttgtgacaaggatcatgcaggaatttgaaagtgacacgtttttcccagaaattgatttggggaaatataaacttctcccagaatacccaggcgtcctctctgaggtccaggaggaaaaaggcatcaagtataagtttgaagtctacgagaagaaagactaaacgcgtggtacctctagagtcgacctgggcggccgcttcgagcagacatgataagatacattgatgagtttggacaaaccacaactagaatgcagtgaaaaaaatgctttatttgtgaaatttgtgatgctattgctttatttgtaaccattataagctgcaataaacaagttaacaacaacaattgcattcattttatgtttcaggttcagggggagatgtgggaggttttttaaagcaagtaaaacctctacaaatgtggtaaaatcgataagtatccgggctggcgtaatagcgaagaggcccgcaccgatcgcccttcccaacagttgcgcagcctgaatggcgaatggacgcgccctgtagcggcgcattaagcgcggcgggtgtggtggttacgcgcagcgtgaccgctacacttgccagcgccctagcgcccgctcctttcgctttcttcccttcctttctcgccacgttcgccggctttccccgtcaagctctaaatcgggggctccctttagggttccgatttagtgctttacggcacctcgaccccaaaaaacttgattagggtgatggttcacgtagtgggccatcgccctgatagacggtttttcgccctttgacgttggagtccacgttctttaatagtggactcttgttccaaactggaacaacactcaaccctatctcggtctattcttttgatttataagggattttgccgatttcggcctattggttaaaaaatgagctgatttaacaaaaatttaacgcgaattttaacaaaatattaacgcttacaatttcctgatgcggtattttctccttacgcatctgtgcggtatttcacaccgcatatggtgcactctcagtacaatctgctctgatgccgcatagttaagccagccccgacacccgccaacacccgctgacgcgccctgacgggcttgtctgctcccggcatccgcttacagacaagctgtgaccgtctccgggagctgcatgtgtcagaggttttcaccgtcatcaccgaaacgcgcgagacgaaagggcctcgtgatacgcctatttttataggttaatgtcatgataataatggtttcttagacgtcaggtggcacttttcggggaaatgtgcgcggaacccctatttgtttatttttctaaatacattcaaatatgtatccgctcatgagacaataaccctgataaatgcttcaataatattgaaaaaggaagagtatgagtattcaacatttccgtgtcgcccttattcccttttttgcggcattttgccttcctgtttttgctcacccagaaacgctggtgaaagtaaaagatgctgaagatcagttgggtgcacgagtgggttacatcgaactggatctcaacagcggtaagatccttgagagttttcgccccgaagaacgttttccaatgatgagcacttttaaagttctgctatgtggcgcggtattatcccgtattgacgccgggcaagagcaactcggtcgccgcatacactattctcagaatgacttggttgagtactcaccagtcacagaaaagcatcttacggatggcatgacagtaagagaattatgcagtgctgccataaccatgagtgataacactgcggccaacttacttctgacaacgatcggaggaccgaaggagctaaccgcttttttgcacaacatgggggatcatgtaactcgccttgatcgttgggaaccggagctgaatgaagccataccaaacgacgagcgtgacaccacgatgcctgtagcaatggcaacaacgttgcgcaaactattaactggcgaactacttactctagcttcccggcaacaattaatagactggatggaggcggataaagttgcaggaccacttctgcgctcggcccttccggctggctggtttattgctgataaatctggagccggtgagcgtgggtctcgcggtatcattgcagcactggggccagatggtaagccctcccgtatcgtagttatctacacgacggggagtcaggcaactatggatgaacgaaatagacagatcgctgagataggtgcctcactgattaagcattggtaactgtcagaccaagtttactcatatatactttagattgatttaaaacttcatttttaatttaaaaggatctaggtgaagatcctttttgataatctcatgaccaaaatcccttaacgtgagttttcgttccactgagcgtcagaccccgtagaaaagatcaaaggatcttcttgagatcctttttttctgcgcgtaatctgctgcttgcaaacaaaaaaaccaccgctaccagcggtggtttgtttgccggatcaagagctaccaactctttttccgaaggtaactggcttcagcagagcgcagataccaaatactgttcttctagtgtagccgtagttaggccaccacttcaagaactctgtagcaccgcctacatacctcgctctgctaatcctgttaccagtggctgctgccagtggcgataagtcgtgtcttaccgggttggactcaagacgatagttaccggataaggcgcagcggtcgggctgaacggggggttcgtgcacacagcccagcttggagcgaacgacctacaccgaactgagatacctacagcgtgagctatgagaaagcgccacgcttcccgaagggagaaaggcggacaggtatccggtaagcggcagggtcggaacaggagagcgcacgagggagcttccagggggaaacgcctggtatctttatagtcctgtcgggtttcgccacctctgacttgagcgtcgatttttgtgatgctcgtcaggggggcggagcctatggaaaaacgccagcaacgcggcctttttacggttcctggccttttgctggccttttgctcacatggctcgacagatct

SEQ ID NO: 12 - protein, 339 aa, Homo sapiens
  Human-Cat-L-His containing heterologous secretory signal
MDPTLILAAFCLGIASATLTFDHSLEAQWTKWKAMHNRLYGMNEEGWRRAVWEKNMKMIELHNQEYREGKHSFTMAMNAFGDMTSEEFRQVMNGFQNRKPRKGKVFQEPLFYEAPRSVDWREKGYVTPVKNQGQCGSCWAFSATGALEGQMFRKTGRLISLSEQNLVDCSGPQGNEGCNGGLMDYAFQYVQDNGGLDSEESYPYEATEESCKYNPKYSVANDTGFVDIPKQEKALMKAVATVGPISVAIDAGHESFLFYKEGIYFEPDCSSEDMDHGVLVVGYGFESTESDNNKYWLVKNSWGEEWGMGGYVKMAKDRRNHCGIASAASYPTVHHHHHH

SEQ ID NO: 13 - DNA, 1020 bp, Homo sapiens
  Encoding human cat-L-His
atggatcctacactcatccttgctgccttttgcctgggaattgcctcagctactctaacatttgatcacagtttagaggcacagtggaccaagtggaaggcgatgcacaacagattatacggcatgaatgaagaaggatggaggagagcagtgtgggagaagaacatgaagatgattgaactgcacaatcaggaatacagggaagggaaacacagcttcacaatggccatgaacgcctttggagacatgaccagtgaagaattcaggcaggtgatgaatggctttcaaaaccgtaagcccaggaaggggaaagtgttccaggaacctctgttttatgaggcccccagatctgtggattggagagagaaaggctacgtgactcctgtgaagaatcagggtcagtgtggttcttgttgggcttttagtgctactggtgctcttgaaggacagatgttccggaaaactgggaggcttatctcactgagtgagcagaatctggtagactgctctgggcctcaaggcaatgaaggctgcaatggtggcctaatggattatgctttccagtatgttcaggataatggaggcctggactctgaggaatcctatccatatgaggcaacagaagaatcctgtaagtacaatcccaagtattctgttgctaatgacaccggctttgtggacatccctaagcaggagaaggccctgatgaaggcagttgcaactgtggggcccatttctgttgctattgatgcaggtcatgagtccttcctgttctataaagaaggcatttattttgagccagactgtagcagtgaagacatggatcatggtgtgctggtggttggctacggatttgaaagcacagaatcagataacaataaatattggctggtgaagaacagctggggtgaagaatggggcatgggtggctacgtaaagatggccaaagaccggagaaaccattgtggaattgcctcagcagccagctaccccactgtgcatcatcatcatcatcattga

SEQ ID NO: 14 - DNA, 6205 bp, Artificial Sequence
  HZ24 expression vector contain Cat-L-His cDNA
tcaatattggccattagccatattattcattggttatatagcataaatcaatattggctattggccattgcatacgttgtatctatatcataatatgtacatttatattggctcatgtccaatatgaccgccatgttggcattgattattgactagttattaatagtaatcaattacggggtcattagttcatagcccatatatggagttccgcgttacataacttacggtaaatggcccgcctggctgaccgcccaacgacccccgcccattgacgtcaataatgacgtatgttcccatagtaacgccaatagggactttccattgacgtcaatgggtggagtatttacggtaaactgcccacttggcagtacatcaagtgtatcatatgccaagtccgccccctattgacgtcaatgacggtaaatggcccgcctggcattatgcccagtacatgaccttacgggactttcctacttggcagtacatctacgtattagtcatcgctattaccatggtgatgcggttttggcagtacaccaatgggcgtggatagcggtttgactcacggggatttccaagtctccaccccattgacgtcaatgggagtttgttttggcaccaaaatcaacgggactttccaaaatgtcgtaataaccccgccccgttgacgcaaatgggcggtaggcgtgtacggtgggaggtctatataagcagagctcgtttagtgaaccgtcagatcactagaagctttattgcggtagtttatcacagttaaattgctaacgcagtcagtgcttctgacacaacagtctcgaacttaagctgcagaagttggtcgtgaggcactgggcaggtaagtatcaaggttacaagacaggtttaaggagaccaatagaaactgggcttgtcgagacagagaagactcttgcgtttctgataggcacctattggtcttactgacatccactttgcctttctctccacaggtgtccactcccagttcaattacagctcttaaggctagagtacttaatacgactcactataggctagccaccatggatcctacactcatccttgctgccttttgcctgggaattgcctcagctactctaacatttgatcacagtttagaggcacagtggaccaagtggaaggcgatgcacaacagattatacggcatgaatgaagaaggatggaggagagcagtgtgggagaagaacatgaagatgattgaactgcacaatcaggaatacagggaagggaaacacagcttcacaatggccatgaacgcctttggagacatgaccagtgaagaattcaggcaggtgatgaatggctttcaaaaccgtaagcccaggaaggggaaagtgttccaggaacctctgttttatgaggcccccagatctgtggattggagagagaaaggctacgtgactcctgtgaagaatcagggtcagtgtggttcttgttgggcttttagtgctactggtgctcttgaaggacagatgttccggaaaactgggaggcttatctcactgagtgagcagaatctggtagactgctctgggcctcaaggcaatgaaggctgcaatggtggcctaatggattatgctttccagtatgttcaggataatggaggcctggactctgaggaatcctatccatatgaggcaacagaagaatcctgtaagtacaatcccaagtattctgttgctaatgacaccggctttgtggacatccctaagcaggagaaggccctgatgaaggcagttgcaactgtggggcccatttctgttgctattgatgcaggtcatgagtccttcctgttctataaagaaggcatttattttgagccagactgtagcagtgaagacatggatcatggtgtgctggtggttggctacggatttgaaagcacagaatcagataacaataaatattggctggtgaagaacagctggggtgaagaatggggcatgggtggctacgtaaagatggccaaagaccggagaaaccattgtggaattgcctcagcagccagctaccccactgtgcatcatcatcatcatcattgaggatccatagctaacgcccctctccctcccccccccctaacgttactggccgaagccgcttggaataaggccggtgtgcgtttgtctatatgttattttccaccatattgccgtcttttggcaatgtgagggcccggaaacctggccctgtcttcttgacgagcattcctaggggtctttcccctctcgccaaaggaatgcaaggtctgttgaatgtcgtgaaggaagcagttcctctggaagcttcttgaagacaaacaacgtctgtagcgaccctttgcaggcagcggaaccccccacctggcgacaggtgcctctgcggccaaaagccacgtgtataagatacacctgcaaaggcggcacaaccccagtgccacgttgtgagttggatagttgtggaaagagtcaaatggctctcctcaagcgtattcaacaaggggctgaaggatgcccagaaggtaccccattgtatgggatctgatctggggcctcggtgcacatgctttacatgtgtttagtcgaggttaaaaaaacgtctaggccccccgaaccacggggacgtggttttcctttgaaaaacacgatgataagcttgccacaacccacagcggccgctgccatcatggttcgaccattgaactgcatcgtcgccgtgtcccaaaatatggggattggcaagaacggagacctaccctggcctccgctcaggaacgagttcaagtacttccaaagaatgaccacaacctcttcagtggaaggtaaacagaatctggtgattatgggtaggaaaacctggttctccattcctgagaagaatcgacctttaaaggacagaattaatatagttctcagtagagaactcaaagaaccaccacgaggagctcattttcttgccaaaagtttggatgatgccttaagacttattgaacaaccggaattggcaagtaaagtagacatggtttggatagtcggaggcagttctgtttaccaggaagccatgaatcaaccaggccacctcagactctttgtgacaaggatcatgcaggaatttgaaagtgacacgtttttcccagaaattgatttggggaaatataaacttctcccagaatacccaggcgtcctctctgaggtccaggaggaaaaaggcatcaagtataagtttgaagtctacgagaagaaagactaaacgcgtggtacctctagagtcgacctgggcggccgcttcgagcagacatgataagatacattgatgagtttggacaaaccacaactagaatgcagtgaaaaaaatgctttatttgtgaaatttgtgatgctattgctttatttgtaaccattataagctgcaataaacaagttaacaacaacaattgcattcattttatgtttcaggttcagggggagatgtgggaggttttttaaagcaagtaaaacctctacaaatgtggtaaaatcgataagtatccgggctggcgtaatagcgaagaggcccgcaccgatcgcccttcccaacagttgcgcagcctgaatggcgaatggacgcgccctgtagcggcgcattaagcgcggcgggtgtggtggttacgcgcagcgtgaccgctacacttgccagcgccctagcgcccgctcctttcgctttcttcccttcctttctcgccacgttcgccggctttccccgtcaagctctaaatcgggggctccctttagggttccgatttagtgctttacggcacctcgaccccaaaaaacttgattagggtgatggttcacgtagtgggccatcgccctgatagacggtttttcgccctttgacgttggagtccacgttctttaatagtggactcttgttccaaactggaacaacactcaaccctatctcggtctattcttttgatttataagggattttgccgatttcggcctattggttaaaaaatgagctgatttaacaaaaatttaacgcgaattttaacaaaatattaacgcttacaatttcctgatgcggtattttctccttacgcatctgtgcggtatttcacaccgcatatggtgcactctcagtacaatctgctctgatgccgcatagttaagccagccccgacacccgccaacacccgctgacgcgccctgacgggcttgtctgctcccggcatccgcttacagacaagctgtgaccgtctccgggagctgcatgtgtcagaggttttcaccgtcatcaccgaaacgcgcgagacgaaagggcctcgtgatacgcctatttttataggttaatgtcatgataataatggtttcttagacgtcaggtggcacttttcggggaaatgtgcgcggaacccctatttgtttatttttctaaatacattcaaatatgtatccgctcatgagacaataaccctgataaatgcttcaataatattgaaaaaggaagagtatgagtattcaacatttccgtgtcgcccttattcccttttttgcggcattttgccttcctgtttttgctcacccagaaacgctggtgaaagtaaaagatgctgaagatcagttgggtgcacgagtgggttacatcgaactggatctcaacagcggtaagatccttgagagttttcgccccgaagaacgttttccaatgatgagcacttttaaagttctgctatgtggcgcggtattatcccgtattgacgccgggcaagagcaactcggtcgccgcatacactattctcagaatgacttggttgagtactcaccagtcacagaaaagcatcttacggatggcatgacagtaagagaattatgcagtgctgccataaccatgagtgataacactgcggccaacttacttctgacaacgatcggaggaccgaaggagctaaccgcttttttgcacaacatgggggatcatgtaactcgccttgatcgttgggaaccggagctgaatgaagccataccaaacgacgagcgtgacaccacgatgcctgtagcaatggcaacaacgttgcgcaaactattaactggcgaactacttactctagcttcccggcaacaattaatagactggatggaggcggataaagttgcaggaccacttctgcgctcggcccttccggctggctggtttattgctgataaatctggagccggtgagcgtgggtctcgcggtatcattgcagcactggggccagatggtaagccctcccgtatcgtagttatctacacgacggggagtcaggcaactatggatgaacgaaatagacagatcgctgagataggtgcctcactgattaagcattggtaactgtcagaccaagtttactcatatatactttagattgatttaaaacttcatttttaatttaaaaggatctaggtgaagatcctttttgataatctcatgaccaaaatcccttaacgtgagttttcgttccactgagcgtcagaccccgtagaaaagatcaaaggatcttcttgagatcctttttttctgcgcgtaatctgctgcttgcaaacaaaaaaaccaccgctaccagcggtggtttgtttgccggatcaagagctaccaactctttttccgaaggtaactggcttcagcagagcgcagataccaaatactgttcttctagtgtagccgtagttaggccaccacttcaagaactctgtagcaccgcctacatacctcgctctgctaatcctgttaccagtggctgctgccagtggcgataagtcgtgtcttaccgggttggactcaagacgatagttaccggataaggcgcagcggtcgggctgaacggggggttcgtgcacacagcccagcttggagcgaacgacctacaccgaactgagatacctacagcgtgagctatgagaaagcgccacgcttcccgaagggagaaaggcggacaggtatccggtaagcggcagggtcggaacaggagagcgcacgagggagcttccagggggaaacgcctggtatctttatagtcctgtcgggtttcgccacctctgacttgagcgtcgatttttgtgatgctcgtcaggggggcggagcctatggaaaaacgccagcaacgcggcctttttacggttcctggccttttgctggccttttgctcacatggctcgacagatct

SEQ ID NO: 15 - protein, 6 aa, Artificial Sequence
  linker
GGGGSG

SEQ ID NO: 16 - DNA, 42 bp, Artificial Sequence
  Human Cat-L 5' primer
aaggccgctagccaccatggatcctacactcatccttgctgc

SEQ ID NO: 17 - DNA, 35 bp, Artificial Sequence
  Human Cat-L 3' primer
gagcacggatcctcatcacacagtggggtagctgg

SEQ ID NO: 18 - DNA, 49 bp, Artificial Sequence
  Human Cat-L-His primer
cctgccggatcctcaatgatgatgatgatgatgcacagtggggtagctg

SEQ ID NO: 19 - DNA, 952 bp, Homo sapiens
  Pancreatic elastase (PE1; Elastase-1) precursor
ttggtccaagcaagaaggcagtggtctactccatcggcaacatgctggtcctttatggacacagcacccaggaccttccggaaaccaatgcccgcgtagtcggagggactgaggccgggaggaattcctggccctctcagatttccctccagtaccggtctggaggttcccggtatcacacctgtggagggacccttatcagacagaactgggtgatgacagctgctcactgcgtggattaccagaagactttccgcgtggtggctggagaccataacctgagccagaatgatggcactgagcagtacgtgagtgtgcagaagatcgtggtgcatccatactggaacagcgataacgtggctgccggctatgacatcgccctgctgcgcctggcccagagcgttaccctcaatagctatgtccagctgggtgttctgccccaggagggagccatcctggctaacaacagtccctgctacatcacaggctggggcaagaccaagaccaatgggcagctggcccagaccctgcagcaggcttacctgccctctgtggactacgccatctgctccagctcctcctactggggctccactgtgaagaacaccatggtgtgtgctggtggagatggagttcgctctggatgccagggtgactctgggggccccctccattgcttggtgaatggcaagtattctgtccatggagtgaccagctttgtgtccagccggggctgtaatgtctccaggaagcctacagtcttcacccaggtctctgcttacatctcctggataaataatgtcatcgcctccaactgaacattttcctgagtccaacgaccttcccaaaatggttcttagatctgcaataggacttgcgatcaaaaagtaaaacacattctgaaagactattgagccattgatagaaaagcaaataaaactagatatacatt

SEQ ID NO: 20 - protein, 258 aa, Homo sapiens
  Pancreatic elastase (PE1; Elastase-1) precursor
MLVLYGHSTQDLPETNARVVGGTEAGRNSWPSQISLQYRSGGSRYHTCGGTLIRQNWVMTAAHCVDYQKTFRVVAGDHNLSQNDGTEQYVSVQKIVVHPYWNSDNVAAGYDIALLRLAQSVTLNSYVQLGVLPQEGAILANNSPCYITGWGKTKTNGQLAQTLQQAYLPSVDYAICSSSSYWGSTVKNTMVCAGGDGVRSGCQGDSGGPLHCLVNGKYSVHGVTSFVSSRGCNVSRKPTVFTQVSAYISWINNVIASN

SEQ ID NO: 21 - protein, 239 aa, Homo sapiens
  Pancreatic elastase (PE1; Elastase-1) proprotein
VGGTEAGRNSWPSQISLQYRSGGSRYHTCGGTLIRQNWVMTAAHCVDYQKTFRVVAGDHNLSQNDGTEQYVSVQKIVVHPYWNSDNVAAGYDIALLRLAQSVTLNSYVQLGVLPQEGAILANNSPCYITGWGKTKTNGQLAQTLQQAYLPSVDYAICSSSSYWGSTVKNTMVCAGGDGVRSGCQGDSGGPLHCLVNGKYSVHGVTSFVSSRGCNVSRKPTVFTQVSAYISWINNVIASN

SEQ ID NO: 22 - DNA, 979 bp, Homo sapiens
  Elastase-2A precursor
cttacagaactcccacggacacaccatgataaggacgctgctgctgtccactttggtggctggagccctcagttgtggggaccccacttacccaccttatgtgactagggtggttggcggtgaagaagcgaggcccaacagctggccctggcaggtctccctgcagtacagctccaatggcaagtggtaccacacctgcggagggtccctgatagccaacagctgggtcctgacggctgcccactgcatcagctcctccaggacctaccgcgtggggctgggccggcacaacctctacgttgcggagtccggctcgctggcagtcagtgtctctaagattgtggtgcacaaggactggaactccaaccaaatctccaaagggaacgacattgccctgctcaaactggctaaccccgtctccctcaccgacaagatccagctggcctgcctccctcctgccggcaccattctacccaacaactacccctgctacgtcacgggctggggaaggctgcagaccaacggggctgttcctgatgtcctgcagcagggccggttgctggttgtggactatgccacctgctccagctctgcctggtggggcagcagcgtgaaaaccagtatgatctgtgctgggggtgatggcgtgatctccagctgcaacggagactctggcgggccactgaactgtcaggcgtctgacggccggtggcaggtgcacggcatcgtcagcttcgggtctcgcctcggctgcaactactaccacaagccctccgtcttcacgcgggtctccaattacatcgactggatcaattcggtgattgcaaataactaaccaaaagaagtccctgggactgtttcagacttggaaaggtcacagaaggaaaataatataataaagtgacaactatgcaaaaaaaaaaaaaaaaaaaaaaaaaaaaaaaaaaataaaaaaaaaaaaaaaaaaaaaaaaaaaaaa

SEQ ID NO: 23 - protein, 269 aa, Homo sapiens
  Elastase-2A precursor
MIRTLLLSTLVAGALSCGDPTYPPYVTRVVGGEEARPNSWPWQVSLQYSSNGKWYHTCGGSLIANSWVLTAAHCISSSRTYRVGLGRHNLYVAESGSLAVSVSKIVVHKDWNSNQISKGNDIALLKLANPVSLTDKIQLACLPPAGTILPNNYPCYVTGWGRLQTNGAVPDVLQQGRLLVVDYATCSSSAWWGSSVKTSMICAGGDGVISSCNGDSGGPLNCQASDGRWQVHGIVSFGSRLGCNYYHKPSVFTRVSNYIDWINSVIANN

SEQ ID NO: 24 - protein, 241 aa, Homo sapiens
  Elastase-2A mature
VVGGEEARPNSWPWQVSLQYSSNGKWYHTCGGSLIANSWVLTAAHCISSSRTYRVGLGRHNLYVAESGSLAVSVSKIVVHKDWNSNQISKGNDIALLKLANPVSLTDKIQLACLPPAGTILPNNYPCYVTGWGRLQTNGAVPDVLQQGRLLVVDYATCSSSAWWGSSVKTSMICAGGDGVISSCNGDSGGPLNCQASDGRWQVHGIVSFGSRLGCNYYHKPSVFTRVSNYIDWINSVIANN

SEQ ID NO: 25 - DNA, 941 bp, Homo sapiens
  Elastase-2B precursor
cttacagaactcccacggacacaccatgattaggaccctgctgctgtccactttggtggctggagccctcagttgtggggtctccacttacgcgcctgatatgtctaggatgcttggaggtgaagaagcgaggcccaacagctggccctggcaggtctccctgcagtacagctccaatggccagtggtaccacacctgcggagggtccctgatagccaacagctgggtcctgacggctgcccactgcatcagctcctccgggatctaccgcgtgatgctgggccagcataacctctacgttgcagagtccggctcgctggccgtcagtgtctctaagattgtggtgcacaaggactggaactccgaccaggtctccaaagggaacgacattgccctgctcaaactggctaaccccgtctccctcaccgacaagatccagctggcctgcctccctcctgccggcaccattctacccaacaactacccctgctacgtcacgggctggggaaggctgcagaccaacggggctctccctgatgacctgaagcagggccggttgctggttgtggactatgccacctgctccagctctggctggtggggcagcaccgtgaagacgaatatgatctgtgctgggggtgatggcgtgatatgcacctgcaacggagactccggtgggccgctgaactgtcaggcatctgacggccggtgggaggtgcatggcatcggcagcctcacgtcggtccttggttgcaactactactacaagccctccatcttcacgcgggtctccaactacaacgactggatcaattcggtgattgcaaataactaaccaaaagaagtccctgggactgtttcagacttggaaaggtcacagaaggaaaataatattatataaagtgacaactatgcaaatcacaaaaaaaaaaaaaaaaaaa

SEQ ID NO: 26 - protein, 269 aa, Homo sapiens
  Elastase-2B precursor
MIRTLLLSTLVAGALSCGVSTYAPDMSRMLGGEEARPNSWPWQVSLQYSSNGQWYHTCGGSLIANSWVLTAAHCISSSRIYRVMLGQHNLYVAESGSLAVSVSKIVVHKDWNSNQVSKGNDIALLKLANPVSLTDKIQLACLPPAGTILPNNYPCYVTGWGRLQTNGALPDDLKQGRLLVVDYATCSSSGWWGSTVKTNMICAGGDGVICTCNGDSGGPLNCQASDGRWEVHGIGSLTSVLGCNYYYKPSIFTRVSNYNDWINSVIANN

SEQ ID NO: 27 - protein, 241 aa, Homo sapiens
  Elastase-2B mature
MLGGEEARPNSWPWQVSLQYSSNGQWYHTCGGSLIANSWVLTAAHCISSSRIYRVMLGQHNLYVAESGSLAVSVSKIVVHKDWNSNQVSKGNDIALLKLANPVSLTDKIQLACLPPAGTILPNNYPCYVTGWGRLQTNGALPDDLKQGRLLVVDYATCSSSGWWGSTVKTNMICAGGDGVICTCNGDSGGPLNCQASDGRWEVHGIGSLTSVLGCNYYYKPSIFTRVSNYNDWINSVIANN

SEQ ID NO: 28 - DNA, 938 bp, Homo sapiens
  Neutrophil elastase precursor
gcacggaggggcagagaccccggagccccagccccaccatgaccctcggccgccgactcgcgtgtcttttcctcgcctgtgtcctgccggccttgctgctggggggcaccgcgctggcctcggagattgtggggggccggcgagcgcggccccacgcgtggcccttcatggtgtccctgcagctgcgcggaggccacttctgcggcgccaccctgattgcgcccaacttcgtcatgtcggccgcgcactgcgtggcgaatgtaaacgtccgcgcggtgcgggtggtcctgggagcccataacctctcgcggcgggagcccacccggcaggtgttcgccgtgcagcgcatcttcgaaaacggctacgaccccgtaaacttgctcaacgacatcgtgattctccagctcaacgggtcggccaccatcaacgccaacgtgcaggtggcccagctgccggctcagggacgccgcctgggcaacggggtgcagtgcctggccatgggctggggccttctgggcaggaaccgtgggatcgccagcgtcctgcaggagctcaacgtgacggtggtgacgtccctctgccgtcgcagcaacgtctgcactctcgtgaggggccggcaggccggcgtctgtttcggggactccggcagccccttggtctgcaacgggctaatccacggaattgcctccttcgtccggggaggctgcgcctcagggctctaccccgatgcctttgccccggtggcacagtttgtaaactggatcgactctatcatccaacgctccgaggacaacccctgtccccacccccgggacccggacccggccagcaggacccactgagaagggctgcccgggtcacctcagctgcccacacccacactctccagcatctggcacaataaacattctctgttttgtagaaaaaaaaaaaaaaaa

SEQ ID NO: 29 - protein, 267 aa, Homo sapiens
  Neutrophil elastase precursor
MTLGRRLACLFLACVLPALLLGGTALASEIVGGRRARPHAWPFMVSLQLRGGHFCGATLIAPNFVMSAAHCVANVNVRAVRVVLGAHNLSRREPTRQVFAVQRIFENGYDPVNLLNDIVILQLNGSATINANVQVAQLPAQGRRLGNGVQCLAMGWGLLGRNRGIASVLQELNVTVVTSLCRRSNVCTLVRGRQAGVCFGDSGSPLVCNGLIHGIASFVRGGCASGLYPDAFAPVAQFVNWIDSIIQRSEDNPCPHPRDPDPASRTH

SEQ ID NO: 30 - protein, 238 aa, Homo sapiens
  Neutrophil elastase mature
IVGGRRARPHAWPFMVSLQLRGGHFCGATLIAPNFVMSAAHCVANVNVRAVRVVLGAHNLSRREPTRQVFAVQRIFENGYDPVNLLNDIVILQLNGSATINANVQVAQLPAQGRRLGNGVQCLAMGWGLLGRNRGIASVLQELNVTVVTSLCRRSNVCTLVRGRQAGVCFGDSGSPLVCNGLIHGIASFVRGGCASGLYPDAFAPVAQFVNWIDSIIQRSEDNPCPHPRDPDPASRTH

SEQ ID NO: 31 - DNA, 1001 bp, Homo sapiens
  Proteinase-3 precursor
cgtgggtgcaccctggaccccaccatggctcaccggccccccagccctgccctggcgtccgtgctgctggccttgctgctgagcggtgctgcccgagctgcggagatcgtgggcgggcacgaggcgcagccacactcccggccctacatggcctccctgcagatgcgggggaacccgggcagccacttctgcggaggcaccttgatccaccccagcttcgtgctgacggccgcgcactgcctgcgggacataccccagcgcctggtgaacgtggtgctcggagcccacaacgtgcggacgcaggagcccacccagcagcacttctcggtggctcaggtgtttctgaacaactacgacgcggagaacaaactgaacgacgttctcctcatccagctgagcagcccagccaacctcagtgcctccgtcgccacagtccagctgccacagcaggaccagccagtgccccacggcacccagtgcctggccatgggctggggccgcgtgggtgcccacgaccccccagcccaggtcctgcaggagctcaatgtcaccgtggtcaccttcttctgccggccacataacatttgcactttcgtccctcgccgcaaggccggcatctgcttcggagactcaggtggccccctgatctgtgatggcatcatccaaggaatagactccttcgtgatctggggatgtgccacccgccttttccctgacttcttcacgcgggtagccctctacgtggactggatccgttccacgctgcgccgtgtggaggccaagggccgcccctgaaccgcccctcccacagcgctggccgggaccccgagcctggctccaaaccctcgaggcggatctttggacagaagcagctcttccccgaacactgtggcgtccgggacggccccacccgtccccccacactccctcccacggggctccgggagacaggccggccctgcacctcaccccaccgtgacctcaataaacgttgaaactcc

SEQ ID NO: 32 - protein, 256 aa, Homo sapiens
  Proteinase-3 precursor
MAHRPPSPALASVLLALLLSGAARAAEIVGGHEAQPHSRPYMASLQMRGNPGSHFCGGTLIHPSFVLTAAHCLRDIPQRLVNVVLGAHNVRTQEPTQQHFSVAQVFLNNYDAENKLNDVLLIQLSSPANLSASVATVQLPQQDQPVPHGTQCLAMGWGRVGAHDPPAQVLQELNVTVVTFFCRPHNICTFVPRRKAGICFGDSGGPLICDGIIQGIDSFVIWGCATRLFPDFFTRVALYVDWIRSTLRRVEAKGRP

SEQ ID NO: 33 - protein, 221 aa, Homo sapiens
  Proteinase-3 mature
IVGGHEAQPHSRPYMASLQMRGNPGSHFCGGTLIHPSFVLTAAHCLRDIPQRLVNVVLGAHNVRTQEPTQQHFSVAQVFLNNYDAENKLNDVLLIQLSSPANLSASVATVQLPQQDQPVPHGTQCLAMGWGRVGAHDPPAQVLQELNVTVVTFFCRPHNICTFVPRRKAGICFGDSGGPLICDGIIQGIDSFVIWGCATRLFPDFFTRVALYVDWIRSTLR

SEQ ID NO: 34 - DNA, 846 bp, Rattus norvegicus
  endogenous vascular elastase
atgcacagctccgtgtacctcgtggctctggtggtcctggaggcggctgtatgtgttgcgcagccccgaggtcggattctgggtggccaggaggccatggcccatgctcggccctacatggcttcagtgcaagtgaatggcacgcacgtgtgcggtggcaccctggtggatgagcagtgggtgctgagcgccgcgcactgcatggatggagtgaccaaggatgaggttgtgcaggtgctcctgggtgcccactccctgtccagtcctgaaccctacaagcatttgtatgatgtgcaaagtgtagtgcttcacccgggcagccggcctgacagcgttgaggacgacctcatgctctttaagctctcccacaatgcctcactgggtccccatgtgagacccctgcccttgcaacgcgaggaccgggaggtgaaacccggcacgctctgcgatgtggccggttggggcgtggtcactcatgcgggacgcaggcccgatgtcctgcagcaactgacagtgtcaatcatggaccggaacacctgcaatctgcgcacgtaccatgatggggcaatcaccaagaacatgatgtgtgcagagagcaaccgcagggacacttgcaggggcgactccggcggtcctctggtgtgcggggatgcggtcgaagctgtggttacgtggggatctcgagtctgtggcaaccggagaaagccaggtgtctttacccgcgtggcaacctacgtgccgtggattgaaaacgttctgagtggtaacgtgagtgttaacgtgacggcctgaggggacaccggagaccgtgactcacaataaatgcatgcatctaaaaaaaaaaaa

SEQ ID NO: 35 - protein, 262 aa, Rattus norvegicus
  Endogenous vascular elastase precursor
HSSVYLVALVVLEAAVCVAQPRGRILGGQEAMAHARPYMASVQVNGTHVCGGTLVDEQWVLSAAHCMDGVTKDEVVQVLLGAHSLSSPEPYKHLYDVQSVVLHPGSRPDSVEDDLMLFKLSHNASLGPHVRPLPLQREDREVKPGTLCDVAGWGVVTHAGRRPDVLQQLTVSIMDRNTCNLRTYHDGAITKNMMCAESNRRDTCRGDSGGPLVCGDAVEAVVTWGSRVCGNRRKPGVFTRVATYVPWIENVLSGNVSVNVTA

SEQ ID NO: 36 - protein, 238 aa, Rattus norvegicus
  endogenous vascular elastase mature
ILGGQEAMAHARPYMASVQVNGTHVCGGTLVDEQWVLSAAHCMDGVTKDEVVQVLLGAHSLSSPEPYKHLYDVQSVVLHPGSRPDSVEDDLMLFKLSHNASLGPHVRPLPLQREDREVKPGTLCDVAGWGVVTHAGRRPDVLQQLTVSIMDRNTCNLRTYHDGAITKNMMCAESNRRDTCRGDSGGPLVCGDAVEAVVTWGSRVCGNRRKPGVFTRVATYVPWIENVLSGNVSVNVTA

SEQ ID NO: 37 - DNA, 924 bp, Homo sapiens
  Cathepsin G precursor
gcacagcagcaactgactgggcagcctttcaggaaagatgcagccactcctgcttctgctggcctttctcctacccactggggctgaggcaggggagatcatcggaggccgggagagcaggccccactcccgcccctacatggcgtatcttcagatccagagtccagcaggtcagagcagatgtggagggttcctggtgcgagaagactttgtgctgacagcagctcattgctggggaagcaatataaatgtcaccctgggcgcccacaatatccagagacgggaaaacacccagcaacacatcactgcgcgcagagccatccgccaccctcaatataatcagcggaccatccagaatgacatcatgttattgcagctgagcagaagagtcagacggaatcgaaacgtgaacccagtggctctgcctagagcccaggagggactgagacccgggacgctgtgcactgtggccggctggggcagggtcagcatgaggaggggaacagatacactccgagaggtgcagctgagagtgcagagggataggcagtgcctccgcatcttcggttcctacgacccccgaaggcagatttgtgtgggggaccggcgggaacggaaggctgccttcaagggggattccggaggccccctgctgtgtaacaatgtggcccacggcatcgtctcctatggaaagtcgtcaggggttcctccagaagtcttcaccagggtctcaagtttcctgccctggataaggacaacaatgagaagcttcaaactgctggatcagatggagacccccctgtgactgactcttcttctcggggacacaggccagctccacagtgttgccagagccttaataaacgtccacagagtataaataaccaattcctcatttgttcattaaacgtcattcagtactta

SEQ ID NO: 38 - protein, 255 aa, Homo sapiens
  Cathepsin G precursor
MQPLLLLLAFLLPTGAEAGEIIGGRESRPHSRPYMAYLQIQSPAGQSRCGGFLVREDFVLTAAHCWGSNINVTLGAHNIQRRENTQQHITARRAIRHPQYNQRTIQNDIMLLQLSRRVRRNRNVNPVALPRAQEGLRPGTLCTVAGWGRVSMRRGTDTLREVQLRVQRDRQCLRIFGSYDPRRQICVGDRRERKAAFKGDSGGPLLCNNVAHGIVSYGKSSGVPPEVFTRVSSFLPWIRTTMRSFKLLDQMETPL

SEQ ID NO: 39 - protein, 235 aa, Homo sapiens
  Cathepsin G mature
IIGGRESRPHSRPYMAYLQIQSPAGQSRCGGFLVREDFVLTAAHCWGSNINVTLGAHNIQRRENTQQHITARRAIRHPQYNQRTIQNDIMLLQLSRRVRRNRNVNPVALPRAQEGLRPGTLCTVAGWGRVSMRRGTDTLREVQLRVQRDRQCLRIFGSYDPRRQICVGDRRERKAAFKGDSGGPLLCNNVAHGIVSYGKSSGVPPEVFTRVSSFLPWIRTTMRSFKLLDQMETPL

SEQ ID NO: 40 - DNA, 784 bp, Homo sapiens
  mast cell chymase precursor
agcatttgctcaggcagcctctctgggaagatgctgcttcttcctctccccctgctgctctttctcttgtgctccagagctgaagctggggagatcatcgggggcacagaatgcaagccacattcccgcccctacatggcctacctggaaattgtaacttccaacggtccctcaaaattttgtggtggtttccttataagacggaactttgtgctgacggctgctcattgtgcaggaaggtctataacagtcacccttggagcccataacataacagaggaagaagacacatggcagaagcttgaggttataaagcaattccgtcatccaaaatataacacttctactcttcaccacgatatcatgttactaaagttgaaggagaaagccagcctgaccctggctgtggggacactccccttcccatcacaattcaactttgtcccacctgggagaatgtgccgggtggctggctggggaagaacaggtgtgttgaagccgggctcagacactctgcaagaggtgaagctgagactcatggatccccaggcctgcagccacttcagagactttgaccacaatcttcagctgtgtgtgggcaatcccaggaagacaaaatctgcatttaagggagactctgggggccctcttctgtgtgctggggtggcccagggcatcgtatcctatggacggtcggatgcaaagccccctgctgtcttcacccgaatctcccattaccggccctggatcaaccagatcctgcaggcaaattaatcctggatcc

SEQ ID NO: 41 - protein, 247 aa, Homo sapiens
  Mast cell chymase precursor
MLLLPLPLLLFLLCSRAEAGEIIGGTECKPHSRPYMAYLEIVTSNGPSKFCGGFLIRRNFVLTAAHCAGRSITVTLGAHNITEEEDTWQKLEVIKQFRHPKYNTSTLHHDIMLLKLKEKASLTLAVGTLPFPSQFNFVPPGRMCRVAGWGRTGVLKPGSDTLQEVKLRLMDPQACSHFRDFDHNLQLCVGNPRKTKSAFKGDSGGPLLCAGVAQGIVSYGRSDAKPPAVFTRISHYRPWINQILQAN

SEQ ID NO: 42 - protein, 226 aa, Homo sapiens
  Mast cell chymase mature
IIGGTECKPHSRPYMAYLEIVTSNGPSKFCGGFLIRRNFVLTAAHCAGRSITVTLGAHNITEEEDTWQKLEVIKQFRHPKYNTSTLHHDIMLLKLKEKASLTLAVGTLPFPSQFNFVPPGRMCRVAGWGRTGVLKPGSDTLQEVKLRLMDPQACSHFRDFDHNLQLCVGNPRKTKSAFKGDSGGPLLCAGVAQGIVSYGRSDAKPPAVFTRISHYRPWINQILQAN

SEQ ID NO: 43 - DNA, 855 bp, Homo sapiens
  Mast cell tryptase precursor
aggcccacgatgctcctccttgctccccagatgctgagcctgctgctgctggcgctgcccgtcctggcgagcccggcctacgtggcccctgccccaggccaggccctgcagcaaacgggcattgttggggggcaggaggcccccaggagcaagtggccctggcaggtgagcctgagagtccgcggcccatactggatgcacttctgcgggggctccctcatccacccccagtgggtgctaaccgcggcgcactgcgtggaaccggacatcaaggatctggccgccctcagggtgcaactgcgggagcagcacctctactaccaggaccagctgctgccggtcagcaggatcatcgtgcacccacagttctacatcatccagaccggggcggacatcgccctgctggagctggaggagcccgtgaacatctccagccacatccacacggtcacgctgccccctgcctcggagaccttccccccggggatgccgtgctgggtcactggctggggcgacgtggacaataatgtgcacctgccgccgccatacccgctgaaggaggtggaagtccccgtagtggaaaaccacctttgcaacgcggaatatcacaccggcctccatacgggccacagctttcaaatcgtccgcgatgacatgctgtgtgcggggagcgaaaatcacgactcctgccagggtgactctggagggcccctggtctgcaaggtgaatggcacctaactgcaggcgggcgtggtcagctgggaggagagctgtgcccagcccaaccggcctggcatctacacccgtgtcacctactacttggactggatccaccactatgtccccaagaagccc

SEQ ID NO: 44 - protein, 242 aa, Homo sapiens
  Mast cell tryptase precursor
MLLLAPQMLSLLLLALPVLASPAYVAPAPGQALQQTGIVGGQEAPRSKWPWQVSLRVRGPYWMHFCGGSLIHPQWVLTAAHCVEPDIKDLAALRVQLREQHLYYQDQLLPVSRIIVHPQFYIIQTGADIALLELEEPVNISSHIHTVTLPPASETFPPGMPCWVTGWGDVDNNVHLPPPYPLKEVEVPVVENHLCNAEYHTGLHTGHSFQIVRDDMLCAGSENHDSCQGDSGGPLVCKVNGT

SEQ ID NO: 45 - protein, 205 aa, Homo sapiens
  Mast cell tryptase mature
IVGGQEAPRSKWPWQVSLRVRGPYWMHFCGGSLIHPQWVLTAAHCVEPDIKDLAALRVQLREQHLYYQDQLLPVSRIIVHPQFYIIQTGADIALLELEEPVNISSHIHTVTLPPASETFPPGMPCWVTGWGDVDNNVHLPPPYPLKEVEVPVVENHLCNAEYHTGLHTGHSFQIVRDDMLCAGSENHDSCQGDSGGPLVCKVNGT

SEQ ID NO: 46 - DNA, 2732 bp, Homo sapiens
  plasmin precursor
aacaacatcctgggattgggacccactttctgggcactgctggccagtcccaaaatggaacataaggaagtggttcttctacttcttttatttctgaaatcaggtcaaggagagcctctggatgactatgtgaatacccagggggcttcactgttcagtgtcactaagaagcagctgggagcaggaagtatagaagaatgtgcagcaaaatgtgaggaggacgaagaattcacctgcagggcattccaatatcacagtaaagagcaacaatgtgtgataatggctgaaaacaggaagtcctccataatcattaggatgagagatgtagttttatttgaaaagaaagtgtatctctcagagtgcaagactgggaatggaaagaactacagagggacgatgtccaaaacaaaaaatggcatcacctgtcaaaaatggagttccacttctccccacagacctagattctcacctgctacacacccctcagagggactggaggagaactactgcaggaatccagacaacgatccgcaggggccctggtgctatactactgatccagaaaagagatatgactactgcgacattcttgagtgtgaagaggaatgtatgcattgcagtggagaaaactatgacggcaaaatttccaagaccatgtctggactggaatgccaggcctgggactctcagagcccacacgctcatggatacattccttccaaatttccaaacaagaacctgaagaagaattactgtcgtaaccccgatagggagctgcggccttggtgtttcaccaccgaccccaacaagcgctgggaactttgcgacatcccccgctgcacaacacctccaccatcttctggtcccacctaccagtgtctgaagggaacaggtgaaaactatcgcgggaatgtggctgttaccgtttccgggcacacctgtcagcactggagtgcacagacccctcacacacataacaggacaccagaaaacttcccctgcaaaaatttggatgaaaactactgccgcaatcctgacggaaaaagggccccatggtgccatacaaccaacagccaagtgcggtgggagtactgtaagataccgtcctgtgactcctccccagtatccacggaacaattggctcccacagcaccacctgagctaacccctgtggtccaggactgctaccatggtgatggacagagctaccgaggcacatcctccaccaccaccacaggaaagaagtgtcagtcttggtcatctatgacaccacaccggcaccagaagaccccagaaaactacccaaatgctggcctgacaatgaactactgcaggaatccagatgccgataaaggcccctggtgttttaccacagaccccagcgtcaggtgggagtactgcaacctgaaaaaatgctcaggaacagaagcgagtgttgtagcacctccgcctgttgtcctgcttccagatgtagagactccttccgaagaagactgtatgtttgggaatgggaaaggataccgaggcaagagggcgaccactgttactgggacgccatgccaggactgggctgcccaggagccccatagacacagcattttcactccagagacaaatccacgggcgggtctggaaaaaaattactgccgtaaccctgatggtgatgtaggtggtccctggtgctacacgacaaatccaagaaaactttacgactactgtgatgtccctcagtgtgcggccccttcatttgattgtgggaagcctcaagtggagccgaagaaatgtcctggaagggttgtgggggggtgtgtggcccacccacattcctggccctggcaagtcagtcttagaacaaggtttggaatgcacttctgtggaggcaccttgatatccccagagtgggtgttgactgctgcccactgcttggagaagtccccaaggccttcatcctacaaggtcatcctgggtgcacaccaagaagtgaatctcgaaccgcatgttcaggaaatagaagtgtctaggctgttcttggagcccacacgaaaagatattgccttgctaaagctaagcagtcctgccgtcatcactgacaaagtaatcccagcttgtctgccatccccaaattatgtggtcgctgaccggaccgaatgtttcatcactggctggggagaaacccaaggtacttttggagctggccttctcaaggaagcccagctccctgtgattgagaataaagtgtgcaatcgctatgagtttctgaatggaagagtccaatccaccgaactctgtgctgggcatttggccggaggcactgacagttgccagggtgacagtggaggtcctctggtttgcttcgagaaggacaaatacattttacaaggagtcacttcttggggtcttggctgtgcacgccccaataagcctggtgtctatgttcgtgtttcaaggtttgttacttggattgagggagtgatgagaaataattaattggacgggagacagagtgacgcactgactcacctagaggctgggacgtgggtagggatttagcatgctggaaataactggcagtaatcaaacgaagacactgtccccagctaccagctacgccaaacctcggcattttttgtgttattttctgactgctggattctgtagtaaggtgacatagctatgacatttgttaaaaataaactctgtacttaactttgatttgagtaaattttggtttt

SEQ ID NO: 47 - protein, 810 aa, Homo sapiens
  plasmin precursor
MEHKEVVLLLLLFLKSGQGEPLDDYVNTQGASLFSVTKKQLGAGSIEECAAKCEEDEEFTCRAFQYHSKEQQCVIMAENRKSSIIIRMRDVVLFEKKVYLSECKTGNGKNYRGTMSKTKNGITCQKWSSTSPHRPRFSPATHPSEGLEENYCRNPDNDPQGPWCYTTDPEKRYDYCDILECEEECMHCSGENYDGKISKTMSGLECQAWDSQSPHAHGYIPSKFPNKNLKKNYCRNPDRELRPWCFTTDPNKRWELCDIPRCTTPPPSSGPTYQCLKGTGENYRGNVAVTVSGHTCQHWSAQTPHTHNRTPENFPCKNLDENYCRNPDGKRAPWCHTTNSQVRWEYCKIPSCDSSPVSTEQLAPTAPPELTPVVQDCYHGDGQSYRGTSSTTTTGKKCQSWSSMTPHRHQKTPENYPNAGLTMNYCRNPDADKGPWCFTTDPSVRWEYCNLKKCSGTEASVVAPPPVVLLPDVETPSEEDCMFGNGKGYRGKRATTVTGTPCQDWAAQEPHRHSIFTPETNPRAGLEKNYCRNPDGDVGGPWCYTTNPRKLYDYCDVPQCAAPSFDCGKPQVEPKKCPGRVVGGCVAHPHSWPWQVSLRTRFGMHFCGGTLISPEWVLTAAHCLEKSPRPSSYKVILGAHQEVNLEPHVQEIEVSRLFLEPTRKDIALLKLSSPAVITDKVIPACLPSPNYVVADRTECFITGWGETQGTFGAGLLKEAQLPVIENKVCNRYEFLNGRVQSTELCAGHLAGGTDSCQGDSGGPLVCFEKDKYILQGVTSWGLGCARPNKPGVYVRVSRFVTWIEGVMRNN

SEQ ID NO: 48 - protein, 713 aa, Homo sapiens
  plasmin mature
VYLSECKTGNGKNYRGTMSKTKNGITCQKWSSTSPHRPRFSPATHPSEGLEENYCRNPDNDPQGPWCYTTDPEKRYDYCDILECEEECMHCSGENYDGKISKTMSGLECQAWDSQSPHAHGYIPSKFPNKNLKKNYCRNPDRELRPWCFTTDPNKRWELCDIPRCTTPPPSSGPTYQCLKGTGENYRGNVAVTVSGHTCQHWSAQTPHTHNRTPENFPCKNLDENYCRNPDGKRAPWCHTTNSQVRWEYCKIPSCDSSPVSTEQLAPTAPPELTPVVQDCYHGDGQSYRGTSSTTTTGKKCQSWSSMTPHRHQKTPENYPNAGLTMNYCRNPDADKGPWCFTTDPSVRWEYCNLKKCSGTEASVVAPPPVVLLPDVETPSEEDCMFGNGKGYRGKRATTVTGTPCQDWAAQEPHRHSIFTPETNPRAGLEKNYCRNPDGDVGGPWCYTTNPRKLYDYCDVPQCAAPSFDCGKPQVEPKKCPGRVVGGCVAHPHSWPWQVSLRTRFGMHFCGGTLISPEWVLTAAHCLEKSPRPSSYKVILGAHQEVNLEPHVQEIEVSRLFLEPTRKDIALLKLSSPAVITDKVIPACLPSPNYVVADRTECFITGWGETQGTFGAGLLKEAQLPVIENKVCNRYEFLNGRVQSTELCAGHLAGGTDSCQGDSGGPLVCFEKDKYILQGVTSWGLGCARPNKPGVYVRVSRFVTWIEGVMRNN

SEQ ID NO: 49 - DNA, 1997 bp, Homo sapiens
  thrombin precursor
aattcctcagtgacccaggagctgacacactatggcgcacgtccgaggcttgcagctgcctggctgcctggccctggctgccctgtgtagccttgtgcacagccagcatgtgttcctggctcctcagcaagcacggtcgctgctccagcgggtccggcgagccaacaccttcttggaggaggtgcgcaagggcaacctagagcgagagtgcgtggaggagacgtgcagctacgaggaggccttcgaggctctggagtcctccacggctacggatgtgttctgggccaagtacacagcttgtgagacagcgaggacgcctcgagataagcttgctgcatgtctggaaggtaactgtgctgagggtctgggtacgaactaccgagggcatgtgaacatcacccggtcaggcattgagtgccagctatggaggagtcgctacccacataagcctgaaatcaactccactacccatcctggggccgacctacaggagaatttctgccgcaaccccgacagcagcaccacgggaccctggtgctacactacagaccccaccgtgaggaggcaggaatgcagcatccctgtctgtggccaggatcaagtcactgtagcgatgactccacgctccgaaggctccagtgtgaatctgtcacctccattggagcagtgtgtccctgatcgggggcagcagtaccaggggcgcctggcggtgaccacacatgggctcccctgcctggcctgggccagcgcacaggccaaggccctgagcaagcaccaggacttcaactcagctgtgcagctggtggagaacttctgccgcaacccagacggggatgaggagggcgtgtggtgctatgtggccgggaagcctggcgactttgggtactgcgacctcaactattgtgaggaggccgtggaggaggagacaggagatgggctggatgaggactcagacagggccatcgaagggcgtaccgccaccagtgagtaccagactttcttcaatccgaggacctttggctcgggagaggcagactgtgggctgcgacctctgttcgagaagaagtcgctggaggacaaaaccgaaagagagctcctggaatcctacatcgacgggcgcattgtggagggctcggatgcagagatcggcatgtcaccttggcaggtgatgcttttccggaagagtccccaggagctgctgtgtggggccagcctcatcagtgaccgctgggtcctcaccgccgcccactgcctcctgtacccgccctgggacaagaacttcaccgagaatgaccttctggtgcgcattggcaagcactcccgcacaaggtacgagcgaaacattgaaaagatatccatgttggaaaagatctacatccaccccaggtacaactggcgggagaacctggaccgggacattgccctgatgaagctgaagaagcctgttgccttcagtgactacattcaccctgtgtgtctgcccgacagggagacggcagccagcttgctccaggctggatacaaggggcgggtgacaggctggggcaacctgaaggagacgtggacagccaacgttggtaaggggcagcccagtgtcctgcaggtggtgaacctgcccattgtggagcggccggtctgcaaggactccacccggatccgcatcactgacaacatgttctgtgctggttacaagcctgatgaagggaaacgaggggatgcctgtgaaggtgacagtgggggaccctttgtcatgaagagcccctttaacaaccgctggtatcaaatgggcatcgtctcatggggtgaaggctgtgaccgggatgggaaatatggcttctacacacatgtgttccgcctgaagaagtggatacagaaggtcattgatcagtttggagagtaggggccactcatattctgggctcctggaaccaatcccgtgaaagaattatttttgtgtttctaaaactatggttcccaataaaagtgactctcagcgg

SEQ ID NO: 50 - protein, 622 aa, Homo sapiens
  thrombin precursor
MAHVRGLQLPGCLALAALCSLVHSQHVFLAPQQARSLLQRVRRANTFLEEVRKGNLERECVEETCSYEEAFEALESSTATDVFWAKYTACETARTPRDKLAACLEGNCAEGLGTNYRGHVNITRSGIECQLWRSRYPHKPEINSTTHPGADLQENFCRNPDSSTTGPWCYTTDPTVRRQECSIPVCGQDQVTVAMTPRSEGSSVNLSPPLEQCVPDRGQQYQGRLAVTTHGLPCLAWASAQAKALSKHQDFNSAVQLVENFCRNPDGDEEGVWCYVAGKPGDFGYCDLNYCEEAVEEETGDGLDEDSDRAIEGRTATSEYQTFFNPRTFGSGEADCGLRPLFEKKSLEDKTERELLESYIDGRIVEGSDAEIGMSPWQVMLFRKSPQELLCGASLISDRWVLTAAHCLLYPPWDKNFTENDLLVRIGKHSRTRYERNIEKISMLEKIYIHPRYNWRENLDRDIALMKLKKPVAFSDYIHPVCLPDRETAASLLQAGYKGRVTGWGNLKETWTANVGKGQPSVLQVVNLPIVERPVCKDSTRIRITDNMFCAGYKPDEGKRGDACEGDSGGPFVMKSPFNNRWYQMGIVSWGEGCDRDGKYGFYTHVFRLKKWIQKVIDQFGE

SEQ ID NO: 51 - protein, 579 aa, Homo sapiens
  Thrombin mature
ANTFLEEVRKGNLERECVEETCSYEEAFEALESSTATDVFWAKYTACETARTPRDKLAACLEGNCAEGLGTNYRGHVNITRSGIECQLWRSRYPHKPEINSTTHPGADLQENFCRNPDSSTTGPWCYTTDPTVRRQECSIPVCGQDQVTVAMTPRSEGSSVNLSPPLEQCVPDRGQQYQGRLAVTTHGLPCLAWASAQAKALSKHQDFNSAVQLVENFCRNPDGDEEGVWCYVAGKPGDFGYCDLNYCEEAVEEETGDGLDEDSDRAIEGRTATSEYQTFFNPRTFGSGEADCGLRPLFEKKSLEDKTERELLESYIDGRIVEGSDAEIGMSPWQVMLFRKSPQELLCGASLISDRWVLTAAHCLLYPPWDKNFTENDLLVRIGKHSRTRYERNIEKISMLEKIYIHPRYNWRENLDRDIALMKLKKPVAFSDYIHPVCLPDRETAASLLQAGYKGRVTGWGNLKETWTANVGKGQPSVLQVVNLPIVERPVCKDSTRIRITDNMFCAGYKPDEGKRGDACEGDSGGPFVMKSPFNNRWYQMGIVSWGEGCDRDGKYGFYTHVFRLKKWIQKVIDQFGE

SEQ ID NO: 52 - DNA, 955 bp, Homo sapiens
  Granzyme B precursor
ccaagagctaaaagagagtaagggggaaacaacagcagctccaaccagggcagccttcctgagaagatgcaaccaatcctgcttctgctggccttcctcctgctgcccagggcagatgcaggggagatcatcgggggacatgaggccaagccccactcccgcccctacatggcttatcttatgatctgggatcagaagtctctgaagaggtgcggtggcttcctgatacaagacgacttcgtgctgacagctgctcactgttggggaagctccataaatgtcaccttgggggcccacaatatcaaagaacaggagccgacccagcagtttatccctgtgaaaagacccatcccccatccagcctataatcctaagaacttctccaacgacatcatgctactgcagctggagagaaaggccaagcggaccagagctgtgcagcccctcaggctacctagcaacaaggcccaggtgaagccagggcagacatgcagtgtggccggctgggggcagacggcccccctgggaaaacactcacacacactacaagaggtgaagatgacagtgcaggaagatcgaaagtgcgaatctgacttacgccattattacgacagtaccattgagttgtgcgtgggggacccagagattaaaaagacttcctttaagggggactctggaggccctcttgtgtgtaacaaggtggcccagggcattgtctcctatggacgaaacaatggcatgcctccacgagcctgcaccaaagtctcaagctttgtacactggataaagaaaaccatgaaacgctactaactacaggaagcaaactaagcccccgctgtaatgaaacaccttctctggagccaagtccagatttacactgggagaggtgccagcaactgaataaatacctcttagctgagtggaaaaaaaaaaaaaaaaaaaaaaaaaaaaaaaa

SEQ ID NO: 53 - protein, 247 aa, Homo sapiens
  Granzyme B precursor
MQPILLLLAFLLLPRADAGEIIGGHEAKPHSRPYMAYLMIWDQKSLKRCGGFLIQDDFVLTAAHCWGSSINVTLGAHNIKEQEPTQQFIPVKRPIPHPAYNPKNFSNDIMLLQLERKAKRTRAVQPLRLPSNKAQVKPGQTCSVAGWGQTAPLGKHSHTLQEVKMTVQEDRKCESDLRHYYDSTIELCVGDPEIKKTSFKGDSGGPLVCNKVAQGIVSYGRNNGMPPRACTKVSSFVHWIKKTMKRY

SEQ ID NO: 54 - protein, 227 aa, Homo sapiens
  Granzyme B mature
IIGGHEAKPHSRPYMAYLMIWDQKSLKRCGGFLIQDDFVLTAAHCWGSSINVTLGAHNIKEQEPTQQFIPVKRPIPHPAYNPKNFSNDIMLLQLERKAKRTRAVQPLRLPSNKAQVKPGQTCSVAGWGQTAPLGKHSHTLQEVKMTVQEDRKCESDLRHYYDSTIELCVGDPEIKKTSFKGDSGGPLVCNKVAQGIVSYGRNNGMPPRACTKVSSFVHWIKKTMKRY

SEQ ID NO: 55 - DNA, 4100 bp, Homo sapiens
  Cathepsin S precursor
gtacctcatgtgacaagttccaatttcttttcaagtcaattgaactgaaatctccttgttgctttgaaatcttagaagagagcccactaattcaaggactcttactgtgggagcaactgctggttctatcacaatgaaacggctggtttgtgtgctcttggtgtgctcctctgcagtggcacagttgcataaagatcctaccctggatcaccactggcatctctggaagaaaacctatggcaaacaatacaaggaaaagaatgaagaagcagtacgacgtctcatctgggaaaagaatctaaagtttgtgatgcttcacaacctggagcattcaatgggaatgcactcatacgatctgggcatgaaccacctgggagacatgaccagtgaagaagtgatgtctttgatgagttccctgagagttcccagccagtggcagagaaatatcacatataagtcaaaccctaatcggatattgcctgattctgtggactggagagagaaagggtgtgttactgaagtgaaatatcaaggttcttgtggtgcttgctgggctttcagtgctgtgggggccctggaagcacagctgaagctgaaaacaggaaagctggtgtctctcagtgcccagaacctggtggattgctcaactgaaaaatatggaaacaaaggctgcaatggtggcttcatgacaacggctttccagtacatcattgataacaagggcatcgactcagacgcttcctatccctacaaagccatggatcagaaatgtcaatatgactcaaaatatcgtgctgccacatgttcaaagtacactgaacttccttatggcagagaagatgtcctgaaagaagctgtggccaataaaggcccagtgtctgttggtgtagatgcgcgtcatccttctttcttcctctacagaagtggtgtctactatgaaccatcctgtactcagaatgtgaatcatggtgtacttgtggttggctatggtgatcttaatgggaaagaatactggcttgtgaaaaacagctggggccacaactttggtgaagaaggatatattcggatggcaagaaataaaggaaatcattgtgggattgctagctttccctcttacccagaaatctagaggatctctcctttttataacaaatcaagaaatatgaagcactttctcttaacttaatttttcctgctgtatccagaagaaataattgtgtcatgattaatgtgtatttactgtactaattagaaaatatagtttgaggccgggcacggtggctcacgcctgtaatcccagtacttgggaggccaaggcaggcatatcaacttgaggccaggagttaaagagcagcctggctaacatggtgaaaccccatctctactaaaaatacaaaaaattagccgagcacggtggtgcatgcctgtaatcccagctacttgggaggctgaggcacgagattccttgaacccaagaggttgaggctatgttgagctgagatcacaccactgtactccagcctggatgacagagtggagactctgtttcaaaaaaacagaaaagaaaatatagtttgattcttcatttttttaaatttgcaaatctcaggataaagtttgctaagtaaattagtaatgtactatagatataactgtacaaaaattgttcaacctaaaacaatctgtaattgcttattgttttattgtatactctttgtctttttaagacccctaatagccttttgtaacttgatggcttaaaaatacttaataaatctgccatttcaaatttctatcattgccacataccattcttattcctaggcaactattaataatctatcctgagaatattaattgtggtattctggtgatggggtttagcaactttgatggaagaaaatattaggctataaatgtcctaaggactcagattgtatctttgtacagaagaggattcaaaacgccacgtgtagtggctcatgcctgtaatcccaacactttgggaggctgaagtaggaggatcgtcttgagcccaggagttcaagaccagcctggacaacatagtgagaccttgtctccacaaaaataaaaaagaaactatccaggagtggtggtgtgtgcctgtggtccctgctatgcagatgtctaagacaggaggatcacaagagcccaggaggttgagaatgcagtgagcttgtaattgcaccactgcactccagcctgggtgacagagcaagaccctgtcttaaaaaaagaggattcaacacatatttttatattatgttaaagtaaagaaatgcataaaagacaagcactttggaagaattattttaatgatcaacaatttaatgtattagtccaaattatttttacgtagtcatcaacaatttgaccagggcctttatttggcaaataactgagccaaccagaataaaataaccaatactccactgctcatatttttatctaattcagatggatcttccttacaactgctctagattagtagatgcatctaagcaggcagcaggaactttaaattttttaagttcatgtctatgacatgaacaatgtgtgggataatgtcattaatatatcctaaattaacctaaacgtatttcactaactctggctccttctccataaagcacattttaaggaacaagaattgctaaatataaaaacataaataataccataatacatggctatcatcaaaagtgtatagaatattatagtttaaaagtatttagttgattacttttcagttttgttttgttttttgagacggagtctcactctgttgcccaggctggagtgcagtggcaccatctcagttcactgcaacttctgcctcccgagttcaagcgattctcctgcctcagcctcccgagtagctggaattataggcgtgcaccaccacgcccagctaatttttgtatttttagtaaagacagggttttgccacattagccaggctggtctcaaactcctgacctcaggtgatccacccaccccagcctcccaaagtgctaagattacaggcgtgagccactgagcccagcctacttttcagtttttaacataatttttgttttatccacaacttttcaagtattgaaagtagaataaaaacatgggttcttagtctttagctatctgttaaagcctatgaatgccttcttaaaatcatgtttttaaatgcataaaatatataggattacaaaggaatctaattatatcgaaatacagttattaaaatgttaaaagataagtttgttatatattaatatgcatgcttctttataaatgcattaaataagagttaatagctatcctaaatttgaaatagtgataagcataatgaaaatagatgcaaaaaactaatgtgatatgaaaatatctgggtttttcttttgatgatgaagtattgctaatattaccgtggtttatgaactatgttcagaattgaagaaaatcctaactttcagttagaggttagtgacggggttcaggacaccctacacaaaatacagcactttgacatattgaatattttaagctgaaggcatttgaggaaattgcagaagcaggaaggtgactctgaccttctgcctgctgttctccccagaagcagccataaaacctgggaaggattttctgaccttcccctgaagtagatcataagactgtcatgtaagaggtgctctcctggcacccagagaaaaggagcatccttacctccaaaagcacagggacacaaagaggaatctaaacaaacaggcctctcagtttcccccagtttattacatttagcttgttcacactttgccctatgacatttctacatcactggctgctcttcatcaaacctactataaaaaacattcaagttcaactgtttctttgggcctttatttccttatggagcccctcgtgtcgtgtaaaacttatattaaataaatgtgcatgcttttctcttgctaatctctcttttgttatagagatctcagccctaaacctaggatggatagaaggaaacatatgttctcccctacattagtaaaaataaaaatggaattttttacccatacaaa

SEQ ID NO: 56 - protein, 331 aa, Homo sapiens
  Cathepsin S precursor
MKRLVCVLLVCSSAVAQLHKDPTLDHHWHLWKKTYGKQYKEKNEEAVRRLIWEKNLKFVMLHNLEHSMGMHSYDLGMNHLGDMTSEEVMSLMSSLRVPSQWQRNITYKSNPNRILPDSVDWREKGCVTEVKYQGSCGACWAFSAVGALEAQLKLKTGKLVSLSAQNLVDCSTEKYGNKGCNGGFMTTAFQYIIDNKGIDSDASYPYKAMDQKCQYDSKYRAATCSKYTELPYGREDVLKEAVANKGPVSVGVDARHPSFFLYRSGVYYEPSCTQNVNHGVLVVGYGDLNGKEYWLVKNSWGHNFGEEGYIRMARNKGNHCGIASFPSYPEI

SEQ ID NO: 57 - protein, 217 aa, Homo sapiens
  Cathepsin S mature
LPDSVDWREKGCVTEVKYQGSCGACWAFSAVGALEAQLKLKTGKLVSLSAQNLVDCSTEKYGNKGCNGGFMTTAFQYIIDNKGIDSDASYPYKAMDQKCQYDSKYRAATCSKYTELPYGREDVLKEAVANKGPVSVGVDARHPSFFLYRSGVYYEPSCTQNVNHGVLVVGYGDLNGKEYWLVKNSWGHNFGEEGYIRMARNKGNHCGIASFPSYPEI

SEQ ID NO: 58 - DNA, 1702 bp, Homo sapiens
  Cathepsin K precursor
aaattttccagccgatcactggagctgacttccgcaatcccgatggaataaatctagcacccctgatggtgtgcccacactttgctgccgaaacgaagccagacaacagatttccatcagcaggatgtgggggctcaaggttctgctgctacctgtggtgagctttgctctgtaccctgaggagatactggacacccactgggagctatggaagaagacccacaggaagcaatataacaacaaggtggatgaaatctctcggcgtttaatttgggaaaaaaacctgaagtatatttccatccataaccttgaggcttctcttggtgtccatacatatgaactggctatgaaccacctgggggacatgaccagtgaagaggtggttcagaagatgactggactcaaagtacccctgtctcattcccgcagtaatgacaccctttatatcccagaatgggaaggtagagccccagactctgtcgactatcgaaagaaaggatatgttactcctgtcaaaaatcagggtcagtgtggttcctgttgggcttttagctctgtgggtgccctggagggccaactcaagaagaaaactggcaaactcttaaatctgagtccccagaacctagtggattgtgtgtctgagaatgatggctgtggagggggctacatgaccaatgccttccaatatgtgcagaagaaccggggtattgactctgaagatgcctacccatatgtgggacaggaagagagttgtatgtacaacccaacaggcaaggcagctaaatgcagagggtacagagagatccccgaggggaatgagaaagccctgaagagggcagtggcccgagtgggacctgtctctgtggccattgatgcaagcctgacctccttccagttttacagcaaaggtgtgtattatgatgaaagctgcaatagcgataatctgaaccatgcggttttggcagtgggatatggaatccagaagggaaacaagcactggataattaaaaacagctggggagaaaactggggaaacaaaggatatatcctcatggctcgaaataagaacaacgcctgtggcattgccaacctggccagcttccccaagatgtgactccagccagccaaatccatcctgctcttccatttcttccacgatggtgcagtgtaacgatgcactttggaagggagttggtgtgctatttttgaagcagatgtggtgatactgagattgtctgttcagtttccccatttgtttgtgcttcaaatgatccttcctactttgcttctctccacccatgacctttttcactgtggccatcaggactttccctgacagctgtgtactcttaggctaagagatgtgactacagcctgcccctgactgtgttgtcccagggctgatgctgtacaggtacaggctggagattttcacataggttagattctcattcacgggactagttagctttaagcaccctagaggactagggtaatctgacttctcacttcctaagttcccttctatatcctcaaggtagaaatgtctatgttttctactccaattcataaatctattcataagtctttggtacaagtttacatgataaaaagaaatgtgatttgtcttcccttctttgcacttttgaaataaagtatttatctcctgtctacagtttaataaatagcatctagtacacat

SEQ ID NO: 59 - protein, 329 aa, Homo sapiens
  Cathepsin K precursor
MWGLKVLLLPVVSFALYPEEILDTHWELWKKTHRKQYNNKVDEISRRLIWEKNLKYISIHNLEASLGVHTYELAMNHLGDMTSEEVVQKMTGLKVPLSHSRSNDTLYIPEWEGRAPDSVDYRKKGYVTPVKNQGQCGSCWAFSSVGALEGQLKKKTGKLLNLSPQNLVDCVSENDGCGGGYMTNAFQYVQKNRGIDSEDAYPYVGQEESCMYNPTGKAAKCRGYREIPEGNEKALKRAVARVGPVSVAIDASLTSFQFYSKGVYYDESCNSDNLNHAVLAVGYGIQKGNKHWIIKNSWGENWGNKGYILMARNKNNACGIANLASFPKM

SEQ ID NO: 60 - protein, 215 aa, Homo sapiens
  Cathepsin K mature
APDSVDYRKKGYVTPVKNQGQCGSCWAFSSVGALEGQLKKKTGKLLNLSPQNLVDCVSENDGCGGGYMTNAFQYVQKNRGIDSEDAYPYVGQEESCMYNPTGKAAKCRGYREIPEGNEKALKRAVARVGPVSVAIDASLTSFQFYSKGVYYDESCNSDNLNHAVLAVGYGIQKGNKHWIIKNSWGENWGNKGYILMARNKNNACGIANLASFPKM

SEQ ID NO: 61 - DNA, 1731 bp, Homo sapiens
  Cathepsin L precursor
ggcggtgccggccgaacccagacccgaggttttagaagcagagtcaggcgaagctgggccagaaccgcgacctccgcaaccttgagcggcatccgtggagtgcgcctgcgcagctacgaccgcagcaggaaagcgccgccggccaggcccagctgtggccggacagggactggaagagaggacgcggtcgagtaggtgtgcaccagccctggcaacgagagcgtctaccccgaactctgctggccttgaggtggggaagccggggagggcagttgaggaccccgcggaggcgcgtgactggttgagcgggcaggccagcctccgagccgggtggacacagttttaaaacatgaatcctacactcatccttgctgccttttgcctgggaattgcctcagctactctaacatttgatcacagtttagaggcacagtggaccaagtggaaggcgatgcacaacagattatacggcatgaatgaagaaggatggaggagagcagtgtgggagaagaacatgaagatgattgaactgcacaatcaggaatacagggaagggaaacacagcttcacaatggccatgaacgcctttggagacatgaccagtgaagaattcaggcaggtgatgaatggctttcaaaaccgtaagcccaggaaggggaaagtgttccaggaacctctgttttatgaggcccccagatctgtggattggagagagaaaggctacgtgactcctgtgaagaatcagggtcagtgtggttcttgttgggcttttagtgctactggtgctcttgaaggacagatgttccggaaaactgggaggcttatctcactgagtgagcagaatctggtagactgctctgggcctcaaggcaatgaaggctgcaatggtggcctaatggattatgctttccagtatgttcaggataatggaggcctggactctgaggaatcctatccatatgaggcaacagaagaatcctgtaagtacaatcccaagtattctgttgctaatgacaccggctttgtggacatccctaagcaggagaaggccctgatgaaggcagttgcaactgtggggcccatttctgttgctattgatgcaggtcatgagtccttcctgttctataaagaaggcatttattttgagccagactgtagcagtgaagacatggatcatggtgtgctggtggttggctacggatttgaaagcacagaatcagataacaataaatattggctggtgaagaacagctggggtgaagaatggggcatgggtggctacgtaaagatggccaaagaccggagaaaccattgtggaattgcctcagcagccagctaccccactgtgtgagctggtggacggtgatgaggaaggacttgactggggatggcgcatgcatgggaggaattcatcttcagtctaccagcccccgctgtgtcggatacacactcgaatcattgaagatccgagtgtgatttgaattctgtgatattttcacactggtaaatgttacctctattttaattactgctataaataggtttatattattgattcacttactgactttgcattttcgtttttaaaaggatgtataaatttttacctgtttaaataaaatttaatttcaaatgtagtggtggggcttctttctatttttgatgcactgaatttttgtgtaataaagaacataattgggctctaagccataaaaaaaaaaaaaaaaaaaa

SEQ ID NO: 62 - protein, 333 aa, Homo sapiens [sequence omitted]

SEQ ID NO: 63 - DNA, 3783 bp, Homo sapiens
  Cathepsin B precursor
ggggcggggccgggagggtacttagggccggggctggcccaggctacggcggctgcagggctccggcaaccgctccggcaacgccaaccgctccgctgcgcgcaggctgggctgcaggctctcggctgcagcgctgggtggatctaggatccggcttccaacatgtggcagctctgggcctccctctgctgcctgctggtgttggccaatgcccggagcaggccctctttccatcccctgtcggatgagctggtcaactatgtcaacaaacggaataccacgtggcaggccgggcacaacttctacaacgtggacatgagctacttgaagaggctatgtggtaccttcctgggtgggcccaagccaccccagagagttatgtttaccgaggacctgaagctgcctgcaagcttcgatgcacgggaacaatggccacagtgtcccaccatcaaagagatcagagaccagggctcctgtggctcctgctgggccttcggggctgtggaagccatctctgaccggatctgcatccacaccaatgcgcacgtcagcgtggaggtgtcggcggaggacctgctcacatgctgtggcagcatgtgtggggacggctgtaatggtggctatcctgctgaagcttggaacttctggacaagaaaaggcctggtttctggtggcctctatgaatcccatgtagggtgcagaccgtactccatccctccctgtgagcaccacgtcaacggctcccggcccccatgcacgggggagggagatacccccaagtgtagcaagatctgtgagcctggctacagcccgacctacaaacaggacaagcactacggatacaattcctacagcgtctccaatagcgagaaggacatcatggccgagatctacaaaaacggccccgtggagggagctttctctgtgtattcggacttcctgctctacaagtcaggagtgtaccaacacgtcaccggagagatgatgggtggccatgccatccgcatcctgggctggggagtggagaatggcacaccctactggctggttgccaactcctggaacactgactggggtgacaatggcttctttaaaatactcagaggacaggatcactgtggaatcgaatcagaagtggtggctggaattccacgcaccgatcagtactgggaaaagatctaatctgccgtgggcctgtcgtgccagtcctgggggcgagatcggggtagaaatgcattttattctttaagttcacgtaagatacaagtttcagacagggtctgaaggactggattggccaaacatcagacctgtcttccaaggagaccaagtcctggctacatcccagcctgtggttacagtgcagacaggccatgtgagccaccgctgccagcacagagcgtccttccccctgtagactagtgccgtagggagtacctgctgccccagctgactgtggccccctccgtgatccatccatctccagggagcaagacagagacgcaggaatggaaagcggagttcctaacaggatgaaagttcccccatcagttcccccagtacctccaagcaagtagctttccacatttgtcacagaaatcagaggagagacggtgttgggagccctttggagaacgccagtctcccaggccccctgcatctatcgagtttgcaatgtcacaacctctctgatcttgtgctcagcatgattctttaatagaagttttattttttcgtgcactctgctaatcatgtgggtgagccagtggaacagcgggagacctgtgctagttttacagattgcctccttatgacgcggctcaaaaggaaaccaagtggtcaggagttgtttctgacccactgatctctactaccacaaggaaaatagtttaggagaaaccagcttttactgtttttgaaaaattacagcttcaccctgtcaagttaacaaggaatgcctgtgccaataaaagttttctccaacttgaagtctactctgatgggatctcagatcctttgtcactgcctatagacttgtagctgctgtctctctttgtccctgcagagaatcacgtcctggaactgcatgttcttgcgactcttgggacttcatcttaacttctcgctgccccagccatgttttcaaccatggcatccctcccccaattagttccctgtcatcctcgtcaaccttctctgtaagtgcctggtaagcttgcccttgcttaagaactcaaaacatagctgtgctctatttttttgttgttgttgtgactgacagagtgagattccgtctcccaggctggagtgcagtggcgccttctcagctcactgcaacctgcagcctcctagattcaagcgattctcctgcttcagccttccgagtagctgggatgacaggcactcaccaatatgcctgggtaatttttgtatttttaagtacatacaggatttcaccatgttggccaggctagtttcaaactcccggcctcaggtggtctgcctgcctcagcctcccaaagtgttgggattacaggcgtgagccactgggccctgcctgtattttttatcagccacaaatccagcaacaagctgaggattcagctcataaaacaggcttggtgtcttggtgatctcacataaccaagatgctaccccgtggggaaccacatccccctggatgccctccagccttggtttgggctggagtcagggcctgtatacagtattttgaatttgtatgccactggtttgcattgctggtcaggaactctagtgctttgcatagccctggtttagaaacatgttatagcagttcttggtatagagcaaactagaagaaccagcaatcattccactgtcctgccaaggtacacctcagtactccccttcccaactgaagtggtatgaggctagctctttccaaaagcattcaagtttggcttctgatgtgactcagaatttaggaaccagatgctagatcaaataagctctgaaaatctgaggaacattgtaggaaaggtttgttaagcatctcttaagtgccatgatgagcataacagccggccgtcgtggctcacgcctgtaatcccagcactttgggaggccaaggtgggaggatgacaaggtcaggagttcaagaccagcctggccaacatgctgaaacctcacctctactaaaaatacaaaaattagctgggcatggtggcacatgcctgtaatcccagctacttgggaggctgaggcaggagaatcgcttgaacccgggaggcggaggttgcagtgagccaagacagtgccagtgcactccagcctcggtgacagcgcaaggctccgtctcaataattaaaaaaaaaaaaaaaaaaaaaaaggccgggcgcagtggctcaagcctgtaatcccagcactttgggaggctgaggcgggcagatcacctgaggtcaggagttttgagatcagccttggcaacacggtgaaaccccatctctactaaaaatacaaaattagccaagcatgctggcacatgcctgtaatcccagctactcgggaggctgaggtacgagaatcgcttgaacctgggaggcagaggatgcagtgagccgagatcacgccattgcactccagcctgggggacaagagtgaatctgtgtctcaccaaaaaaaaaaagaaaaagaaagatgcttaacaaaggttaccataagccacaaattcataaccacttatccttccagtttcaagtagaatatattcataacctcaataaagttctccctgctcccaaa

SEQ ID NO: 64 - protein, 339 aa, Homo sapiens
  cathepsin B precursor
MWQLWASLCCLLVLANARSRPSFHPLSDELVNYVNKRNTTWQAGHNFYNVDMSYLKRLCGTFLGGPKPPQRVMFTEDLKLPASFDAREQWPQCPTIKEIRDQGSCGSCWAFGAVEAISDRICIHTNAHVSVEVSAEDLLTCCGSMCGDGCNGGYPAEAWNFWTRKGLVSGGLYESHVGCRPYSIPPCEHHVNGSRPPCTGEGDTPKCSKICEPGYSPTYKQDKHYGYNSYSVSNSEKDIMAEIYKNGPVEGAFSVYSDFLLYKSGVYQHVTGEMMGGHAIRILGWGVENGTPYWLVANSWNTDWGDNGFFKILRGQDHCGIESEVVAGIPRTDQYWEKI

SEQ ID NO: 65 - protein, 260 aa, Homo sapiens
  cathepsin B mature
  cathepsin B light chain 1-47
  cathepsin B heavy chain 48-254
LPASFDAREQWPQCPTIKEIRDQGSCGSCWAFGAVEAISDRICIHTNAHVSVEVSAEDLLTCCGSMCGDGCNGGYPAEAWNFWTRKGLVSGGLYESHVGCRPYSIPPCEHHVNGSRPPCTGEGDTPKCSKICEPGYSPTYKQDKHYGYNSYSVSNSEKDIMAEIYKNGPVEGAFSVYSDFLLYKSGVYQHVTGEMMGGHAIRILGWGVENGTPYWLVANSWNTDWGDNGFFKILRGQDHCGIESEVVAGIPRTDQYWEKI

SEQ ID NO: 66 - DNA, 1399 bp, Homo sapiens
  cathepsin H precursor
ttgccggcgcaagagccaagccgccagcgctgctatgtgggccacgctgccgctgctctgcgccggggcctggctcctgggagtccccgtctgcggtgccgccgaactgtccgtgaactccttagagaagtttcacttcaagtcatggatgtctaagcaccgtaagacctacagtacggaggagtaccaccacaggctgcagacgtttgccagcaactggaggaagataaacgcccacaacaatgggaaccacacatttaaaatggcactgaaccaattttcagacatgagctttgctgaaataaaacacaagtatctctggtcagagcctcagaattgctcagccaccaaaagtaactaccttcgaggtactggtccctacccaccttccgtggactggcggaaaaaaggaaattttgtctcacctgtgaaaaatcagggtgcctgcggcagttgctggactttctccaccactggggccctggagtctgcaatcgccatcgcaaccggaaagatgctgtccttggcggaacagcagctggtggactgcgcccaggacttcaataattacggctgccaagggggtctccccagccaggctttcgagtatatcctgtacaacaaggggatcatgggtgaagacacctacccctaccagggcaaggatggttattgcaagttccaacctggaaaggccatcggctttgtcaaggatgtagccaacatcacaatctatgacgaggaagcgatggtggaggctgtggccctctacaaccctgtgagctttgcctttgaggtgactcaggacttcatgatgtatagaacgggcatctactccagtacttcctgccataaaactccagataaagtaaaccatgcagtactggctgttgggtatggagaaaaaaatgggatcccttactggatcgtgaaaaactcttggggtccccagtggggaatgaacgggtacttcctcatcgagcgcggaaagaacatgtgtggcctggctgcctgcgcctcctaccccatccctctggtgtgagccgtggcagccgcagcgcagactggcggagaaggagaggaacgggcagcctgggcctgggtggaaatcctgccctggaggaagttgtggggagatccactgggacccccaacattctgccctcacctctgtgcccagcctggaaacctacagacaaggaggagttccaccatgagctcacccgtgtctatgacgcaaagatcaccagccatgtgccttagtgtccttcttaacagactcaaaccacatggaccacgaatattctttctgtccagaagggctactttccacatatagagctccagggactgtcttttctgtattcgctgttcaataaacattgagtgagcacctcca

SEQ ID NO: 67 - protein, 335 aa, Homo sapiens [sequence omitted]

SEQ ID NO: 68 - protein, 238 aa, Homo sapiens
  cathepsin H mature
EPQNCSATKSNYLRGTGPYPPSVDWRKKGNFVSPVKNQGACGSCWTFSTTGALESAIAIATGKMLSLAEQQLVDCAQDFNNHGCQGGLPSQAFEYILYNKGIMGEDTYPYQGKDGYCKFQPGKAIGFVKDVANITIYDEEAMVEAVALYNPVSFAFEVTQDFMMYRTGIYSSTSCHKTPDKVNHAVLAVGYGEKNGIPYWIVKNSWGPQWGMNGYFLIERGKNMCGLAACASYPIPLV

SEQ ID NO: 69 - DNA, 1975 bp, Mus musculus
  cathepsin F precursor
cggtgcccattggccgccccggcgttctccaacgttgtagggaaactctctgtggcctctgacagcaggctccgcctcgggtctcttgatccgtgtgtttgtgggtcagtgaatccgggcgagcagcttcgacctcgctatggcgcccctactgcagcttctgtggctgctgacactgctctcgactgtggccctgagccccgtccccgccaagccctgggcagatgacgagcaggcctggaacttgtcgtcccaggagctgctggcccccgcccgcttcgcgctggacatgtacaattacggccgtgctgcggggacaagggccgtgctaggagcggtgcgcggacgcgtccgccgggccggccagggctctctgttctccctggaagccacactagaggagccaccttgcaatgatcccctggtgtgcccactgcctgagacgaagaaaacagtgctctgcagttttgaagtcctggaagagctaaaagaacacttgctgctgaggagggactgtagcccagtgaatgccaaggtcacagagtttagaaatgcgactttcagctcattccttccattgttggacaaggatcccctgccccaggacttctctgtgaagatggctccactcttcaaggacttcatgaccacctataaccggacttatgaatcaagggaagaagcccagtggcgattgactgtctttgcaagaaatatgatacgagcacagaagattcaggccctggaccgcggcacagctcagtatgggatcaccaagttcagtgacctcacagaggaggaattccacaccatctacctgaatcccctcttacagaaggagtctggcaggaagatgagtccagccaagtccataaatgatcttgccccgcctgaatgggactggaggaagaaaggggctgtcactgaagtgaagaaccagggcatgtgtggctcctgctgggccttttctgtcacaggcaacgtggagggccagtggttcctgaaccgggggactctgctctccctgtcagagcaggagctcttggattgtgacaaggtggacaaggcctgcttgggtggattgccctccaacgcctatgcagccataaagaatttgggagggctggagacagaggatgactacggctaccagggccatgttcagacctgcaacttctcagcacagatggcaaaagtctacatcaatgattcagtggagctgagccggaatgaaaataagatagcagcctggctggcccagaaaggacctatctcagttgccattaacgccttcggcatgcagttctatcgccacgggattgctcacccattccggcccctctgcagcccttggttcatcgaccatgctgtgttgctggtgggctatggcaaccgctctaacattccttactgggccatcaagaacagctggggcagtgactggggtgaggagggttactactacttgtaccgtggatctggagcctgtggtgtgaataccatggccagctcagccgtggtgaactgagagttgctggctcaggacctatgttgtcacagtggccccttccttagcccgactcatgcccaggcccttcctcacgagacagagctggttggctgagggccgggcactttggacctcacggtgagccctgggccctgggccccttcgtccctctttcctctagtgctcatctgaagttccccagctgcacctgtgtccgattgtggtagctaggaggatcctgaggtgcaggaggctttcatggaagccagcgccggggcaagaacctggctacagtatgatgcaggatgaaaatatgctcgtcataaaactagatctgtcctcagcaggctctgtctttttgctttggtgctcctcggtctgatgctgtcagttttctggtccctttccacatccaggaaagttgtgaccggccttctctaagggcaataaagaggtagcctgctc

SEQ ID NO: 70 - protein, 462 aa, Mus musculus
  cathepsin F precursor
MAPLLQLLWLLTLLSTVALSPVPAKPWADDEQAWNLSSQELLAPARFALDMYNYGRAAGTRAVLGAVRGRVRRAGQGSLFSLEATLEEPPCNDPLVCPLPETKKTVLCSFEVLEELKEHLLLRRDCSPVNAKVTEFRNATFSSFLPLLDKDPLPQDFSVKMAPLFKDFMTTYNRTYESREEAQWRLTVFARNMIRAQKIQALDRGTAQYGITKFSDLTEEEFHTIYLNPLLQKESGRKMSPAKSINDLAPPEWDWRKKGAVTEVKNQGMCGSCWAFSVTGNVEGQWFLNRGTLLSLSEQELLDCDKVDKACLGGLPSNAYAAIKNLGGLETEDDYGYQGHVQTCNFSAQMAKVYINDSVELSRNENKIAAWLAQKGPISVAINAFGMQFYRHGIAHPFRPLCSPWFIDHAVLLVGYGNRSNIPYWAIKNSWGSDWGEEGYYYLYRGSGACGVNTMASSAVVN

SEQ ID NO: 71 - protein, 214 aa, Mus musculus
  cathepsin F mature
APPEWDWRKKGAVTEVKNQGMCGSCWAFSVTGNVEGQWFLNRGTLLSLSEQELLDCDKVDKACLGGLPSNAYAAIKNLGGLETEDDYGYQGHVQTCNFSAQMAKVYINDSVELSRNENKIAAWLAQKGPISVAINAFGMQFYRHGIAHPFRPLCSPWFIDHAVLLVGYGNRSNIPYWAIKNSWGSDWGEEGYYYLYRGSGACGVNTMASSAVVN

SEQ ID NO: 72 - DNA, 3453 bp, Mus musculus
  cathepsin O precursor
gaaaccgaaagagaaagcgggccgggcacagtggacctcgggcaccgggatgaagccgcagttggtgaacctcttgctactgtgttgctgctgtctcggccgccacggggtcgccgggacctggtcttggagccaccagcgggaggccgccgccttgcgggaaagccttcatagacaccgatacttgaactcttttcctcatgaaaactccactgccttctatggagtaaatcagttttcttatttgtttcctgaagagtttaaagctttgtatttaggcagcaaatatgcctgggctcccagatacccagcagaaggacagagacctatccccaatgtgtctttgccattgagatttgactggagggacaagcatgttgtgaatcctgtaaggaaccaggagatgtgtggaggatgctgggccttcagcgtggtgagtgccatagagtcagctcgtgcaatccaagggaaatctctggattacctgagcgtgcagcaggtcatcgactgctcctttaataattctggctgcctcggtggctctcctctctgtgccttgcgctggctaaatgagacacagttgaagttggtggcagattcacagtacccattcaaggcagtaaatggccagtgtcgccactttcctcaatcacaagctggagtttcagtcaaggatttttctgcatataacttcaggggccaagaggatgaaatggccagagcacttctgtccttcggccctttggttgtgatagttgatgcgatgagctggcaggattatctggggggcataatccaacatcactgctccagtggggaggccaaccatgccgttctcatcacaggctttgataggacaggaaatacaccatattggatggtgcgaaactcctggggatcctcctggggagtagaaggctatgcccacgtgaaaatgggaggtaatgtttgtggcattgcagactctgtagctgctgtctttgtgtgatcatgaattgttttggattcaccatgagacaactacgaaaatgatgcacttcatagtgtgatccaacatcatactcaactctaagcattatgcaccttcaagttccaacaatttgtctacagagaggttctaagagcaaactggcattttgtaaagcaacctaggacattctattttttgcaaagacatggacagccaaacttcataggaaatccccaggacgttgactgatcaacggactctgtgggatagtgtgcacctctgagagtttggtgggatcagaagtcacatagtattctcctcctggaagcagttgggacttttgcttgcttgttgtctttctggctgtctacattaaggaagtattttggtcagggtgaattgaagatatgatgagcctttgtttttcccttgtgacttataatcaccagtcttagattacctcatctacaagaactctcaacctgatgcaatgtgtgcctcataattagaatggccttctgttccatgtgaacagatttggaatatcagttgttttatttcagcaaatggaacttactctagacagtagaacaaatgtgcaccaagatgaaacaacgatgcacaaagagaatcccatcttcagagagacaatccaactggagttaaataaacacgtgacaacagtgtgataaggagtacactatgccacttccagggagtcatgatgtctataaagcttcacttttaaacacccaaaatgtttagcttcttgccttcttccctctgaggtagagaatgaagtattgtccacatttattccctctcttgtcctttatggtacaagtcctatggtttcctggtggtttaccttccagtccaaagtaactcagtaccgttggttgtattccatttctgttacccaatctcttacttaaaaacaaaatctctgacacaggctcacattgctccttgtttatgtccttcattagaataccagcatcaataacaaagctccttactcttttgtctgtaccagtgagaagcaatcttgaatgtgcagatcatggagggtaaagaaacggcagaagacatttcttaaggttttgaataaagtagcctaattatcgaaggaatccaggaaggaatgtagttcagctatagtgtttcttaatgactttcattatgttatcagcaatgtttctaatacccagtttcaaatgcagataaacttgaaattttcaaaatcactgttactctttaagtattctggattgataacatttataataatacaacctacatttgactttgaattaaaagtaacttattcttaaatatgtagtctatgatttattattatttatgagcactaatagatatttattagtatcgataagctttatatttacattttcttggatttgaacccttatatccaatgtgcttttctccatagatgattttaattccaccatgtccaagattcctctcatcatcttcccatatctgttgtcaatgctcagtggtcctcttctccttaccttttctttctgtcagcagcattgctattgtataagcaggccatagagtcaaaaggaattctagacaatcaagttgtctcctccttagaacccattcctacatctgtctccatcctctctttcacgcatcctttctgggaggtacactttttattatctcctatctacactcttcagttgtttccagccaacctaaaataaaaagggagatatcttcataaaagtttaggttttttttttgtttgtttgtttgtttggttggcttttgtcttttatttttgtatagagttatgatgagttttgatgtgatgcacttcaaacactttttgtgatagtttttgttatgtatcaattatatgtaacactccctttcagtgacttgttagctttattcctttcgttttcttgttagtgcctggtgtaagtaactccctatggttctgacaacctttattagtaactaaactatgtgacctttaacacagtaggtcctgaacagtaatctccagagcagaacagatggctttgaaagatgctactataatgtgtcctatatttccccagatttatatttctaaaatgatgttatcattttactcacaagttttacagcactggaaatcagtaagataacatgcaaattttttcaaataagcattatggagaggtctctctctacctttgtatcccctgtaaataagtgatgacgcatatacaccagctcatgggtgctcctgccccagaaaaccagagacagagcagccgaatgtgttccttactacacagcattcatactgaagatcaccaacaggtcctgaaagtgatttgacaaggtccccattgcaactgttaaatgggtcaactttgcagtgcctttgaaatatcccatcacttgggaggcagaggcaggtgaatttctgaggtcaaggccagcccccccac

SEQ ID NO: 73 - protein, 312 aa, Mus musculus
  cathepsin O precursor
MKPQLVNLLLLCCCCLGRHGVAGTWSWSHQREAAALRESLHRHRYLNSFPHENSTAFYGVNQFSYLFPEEFKALYLGSKYAWAPRYPAEGQRPIPNVSLPLRFDWRDKHVVNPVRNQEMCGGCWAFSVVSAIESARAIQGKSLDYLSVQQVIDCSFNNSGCLGGSPLCALRWLNETQLKLVADSQYPFKAVNGQCRHFPQSQAGVSVKDFSAYNFRGQEDEMARALLSFGPLVVIVDAMSWQDYLGGIIQHHCSSGEANHAVLITGFDRTGNTPYWMVRNSWGSSWGVEGYAHVKMGGNVCGIADSVAAVFV

SEQ ID NO: 74 - protein, 214 aa, Mus musculus
  cathepsin O mature
LPLRFDWRDKHVVNPVRNQEMCGGCWAFSVVSAIESARAIQGKSLDYLSVQQVIDCSFNNSGCLGGSPLCALRWLNETQLKLVADSQYPFKAVNGQCRHFPQSQAGVSVKDFSAYNFRGQEDEMARALLSFGPLVVIVDAMSWQDYLGGIIQHHCSSGEANHAVLITGFDRTGNTPYWMVRNSWGSSWGVEGYAHVKMGGNVCGIADSVAAVFV

SEQ ID NO: 75 - DNA, 1335 bp, Mus musculus
  cathepsin R precursor
agcaacttttgaagagttgagtctgtggagtggattgaggcagaggcagtcacctcaggtacttgagacatggctgctgttgtcttcatagccttcctgtatttgggagtggcctcaggtgttccagtacttgattcaagtttggatgctgaatggcaagactggaagataaagtataacaaatcatatagcctgaaggaagaaaaactgaagagagtggtttgggaagaaaaattgaaaatgatcaaactacacaacagggagaacagcctgggtaagaatggcttcaccatgaaaatgaatgaatttggtgaccagactgatgaagaattcaggaaaatgatgattgaaatttcagtttggactcacagagaggggaaaagtatcatgaaacgggaagctggcagtattctccccaaatttgtcgattggcgaaagaaaggatatgtgactcctgtacggagacagggagattgtgatgcttgttgggcatttgctgtgactggtgccatagaagcacaggcaatctggcaaacgggcaaactcacccctctgagtgtgcagaacctggtggactgttctaaacctcaaggcaacaatggttgtcttggtggtgatacatacaatgccttccagtatgttttgcacaatggtggtctggagtctgaggcaacatatccatatgaagggaaagatggaccatgcaggtataatccaaagaattctaaggctgaaatcacaggatttgtgtccctcccccaaagtgaggatatcctaatggctgctgtagcaactattgggcccatcactgctggaattgatgcttcacatgagtctttcaagaactataagggaggtatttaccatgagccaaattgtagcagtgatactgtgactcatggagtcctcgtggttggttacggatttaagggaattgagaccgatggtaatcactactggctgatcaagaatagctggggtaaacgatggggcattagaggctacatgaagctcgccaaagacaagaacaaccactgtggaattgcttcatatgctcactaccctactatttgagcaacctggtggccacaaggaaggttttggcacaagacagcatttctaggggagggctatctgctagtcagcgaccagcctttgcttggtatattcaagacttgtgtccctgaagagcaaccttgtaatgtgattctgggacccttcaactattttgacatcatgaacactattgctctaactaacgtatgtttattattccttcaaaaaaatcagctttaccgattgtgcaaataaaatcctttaaaaaataaaatgcaa

SEQ ID NO: 76 - protein, 334 aa, Mus musculus
  cathepsin R precursor
MAAVVFIAFLYLGVASGVPVLDSSLDAEWQDWKIKYNKSYSLKEEKLKRVVWEEKLKMIKLHNRENSLGKNGFTMKMNEFGDQTDEEFRKMMIEISVWTHREGKSIMKREAGSILPKFVDWRKKGYVTPVRRQGDCDACWAFAVTGAIEAQAIWQTGKLTPLSVQNLVDCSKPQGNNGCLGGDTYNAFQYVLHNGGLESEATYPYEGKDGPCRYNPKNSKAEITGFVSLPQSEDILMAAVATIGPITAGIDASHESFKNYKGGIYHEPNCSSDTVTHGVLVVGYGFKGIETDGNHYWLIKNSWGKRWGIRGYMKLAKDKNNHCGIASYAHYPTI

SEQ ID NO: 77 - protein, 220 aa, Mus musculus
  cathepsin R mature
LPKFVDWRKKGYVTPVRRQGDCDACWAFAVTGAIEAQAIWQTGKLTPLSVQNLVDCSKPQGNNGCLGGDTYNAFQYVLHNGGLESEATYPYEGKDGPCRYNPKNSKAEITGFVSLPQSEDILMAAVATIGPITAGIDASHESFKNYKGGIYHEPNCSSDTVTHGVLVVGYGFKGIETDGNHYWLIKNSWGKRWGIRGYMKLAKDKNNHCGIASYAHYPTI

SEQ ID NO: 78 - DNA, 1327 bp, Homo sapiens
  cathepsin W precursor
tgcgcggcttcctgcctccatgccactccagactgcaccggcatggcactgactgcccacccctcctgcctcctggccctgttggtggcaggcctagcccaaggcatcagaggcccccttagggcccaggacctaggtccccagccgctagagctgaaagaggccttcaagttgttccagatccagttcaaccggagttacctgagcccagaagagcatgctcaccgcctggacatctttgcccacaacctggcccaggctcagaggctgcaggaggaggacttgggcacagctgagtttggggtgactccattcagtgacctcacagaggaggagtttggccagctctatggctatcggagggcagctggaggggtccccagcatgggcagagaaataaggtctgaagagccagaggagtcagtacctttcagctgtgactggcggaaggtggccggcgccatctcacccatcaaggaccagaaaaactgcaactgctgctgggccatggcagcggcaggcaacatagagaccctgtggcgcatcagtttctgggattttgtggacgtctccgtgcaggaactgctggactgtggccgctgtggggatggctgccacggtggcttcgtctgggacgcgttcataactgtcctcaacaacagcggcctggccagtgaaaaggactacccgttccagggcaaagtcagagcccacaggtgccaccccaagaagtaccagaaggtggcctggatccaggacttcatcatgctgcagaacaacgagcacagaattgcgcagtacctggccacttatggccccatcaccgtgaccatcaacatgaagccccttcagctataccggaaaggtgtgatcaaggccacacccaccacctgtgacccccagcttgtggaccactctgtcctgctggtgggttttggcagcgtcaagtcagaggaggggatatgggcagagacagtctcatcgcagtctcagcctcagcctccacaccccaccccatactggatcctgaagaactcctggggggcccaatggggagagaagggctatttccggctgcaccgagggagcaatacctgtggcatcaccaagttcccgctcactgcccgtgtgcagaaaccggatatgaagccccgagtctcctgccctccctgaacccacctggccccctcagctctgtcctgttaggccaactgcctccttgccagccccacccccaggtttttgcccatcctcccaatctcaatacagcctgaataaaccaagacaagacctctgaaaaaaaaaaaaaaaaaaaaaaaaaaaaaaa

SEQ ID NO: 79 - protein, 376 aa, Homo sapiens
  cathepsin W precursor
MALTAHPSCLLALLVAGLAQGIRGPLRAQDLGPQPLELKEAFKLFQIQFNRSYLSPEEHAHRLDIFAHNLAQAQRLQEEDLGTAEFGVTPFSDLTEEEFGQLYGYRRAAGGVPSMGREIRSEEPEESVPFSCDWRKVAGAISPIKDQKNCNCCWAMAAAGNIETLWRISFWDFVDVSVQELLDCGRCGDGCHGGFVWDAFITVLNNSGLASEKDYPFQGKVRAHRCHPKKYQKVAWIQDFIMLQNNEHRIAQYLATYGPITVTINMKPLQLYRKGVIKATPTTCDPQLVDHSVLLVGFGSVKSEEGIWAETVSSQSQPQPPHPTPYWILKNSWGAQWGEKGYFRLHRGSNTCGITKFPLTARVQKPDMKPRVSCPP

SEQ ID NO: 80 - protein, 249 aa, Homo sapiens
  cathepsin W mature
VPFSCDWRKVAGAISPIKDQKNCNCCWAMAAAGNIETLWRISFWDFVDVSVHELLDCGRCGDGCHGGFVWDAFITVLNNSGLASEKDYPFQGKVRAHRCHPKKYQKVAWIQDFIMLQNNEHRIAQYLATYGPITVTINMKPLQLYRKGVIKATPTTCDPQLVDHSVLLVGFGSVKSEEGIWAETVSSQSQPQPPHPTPYWILKNSWGAQWGEKGYFRLHRGSNTCGITKFPLTARVQKPDMKPRVSCPP

SEQ ID NO: 81 - DNA, 3007 bp, Homo sapiens
  calpain 1 large subunit precursor
aaggagagagggagggcggagggcggaggggcggcgggaggagggcggggaggagcgctcttcctggttgggccctgccctgagctgccaccgggaagccagcctcagggactgcagcgacccccaaacacccctcccccaggatgtcggaggagatcatcacgccggtgtactgcactggggtgtcagcccaagtgcagaagcagcgggccagggagctgggcctgggccgccatgagaatgccatcaagtacctgggccaggattatgagcagctgcgggtgcgatgcctgcagagtgggaccctcttccgtgatgaggccttccccccggtaccccagagcctgggttacaaggacctgggtcccaattcctccaagacctatggcatcaagtggaagcgtcccacggaactgctgtcaaacccccagttcattgtggatggagctacccgcacagacatctgccagggagcactgggggactgctggctcttggcggccattgcctccctcactctcaacgacaccctcctgcaccgagtggttccgcacggccagagcttccagaatggctatgccggcatcttccatttccagctgtggcaatttggggagtgggtggacgtggtcgtggatgacctgctgcccatcaaggacgggaagctagtgttcgtgcactctgccgaaggcaacgagttctggagcgccctgcttgagaaggcctatgccaaggtaaatggcagctacgaggccctgtcagggggcagcacctcagagggctttgaggacttcacaggcggggttaccgagtggtacgagttgcgcaaggctcccagtgacctctaccagatcatcctcaaggcgctggagcggggctccctgctgggctgctccatagacatctccagcgttctagacatggaggccatcactttcaagaagttggtgaagggccatgcctactctgtgaccggggccaagcaggtgaactaccgaggccaggtggtgagcctgatccggatgcggaacccctggggcgaggtggagtggacgggagcctggagcgacagctcctcagagtggaacaacgtggacccatatgaacgggaccagctccgggtcaagatggaggacggggagttctggatgtcattccgagacttcatgcgggagttcacccgcctggagatctgcaacctcacacccgacgccctcaagagccggaccatccgcaaatggaacaccacactctacgaaggcacctggcggcgggggagcaccgcggggggctgccgaaactacccagccaccttctgggtgaaccctcagttcaagatccggctggatgagacggatgacccggacgactacggggaccgcgagtcaggctgcagcttcgtgctcgcccttatgcagaagcaccgtcgccgcgagcgccgcttcggccgcgacatggagactattggcttcgcggtctacgaggtccctccggagctggtgggccagccggccgtacacttgaagcgtgacttcttcctggccaatgcgtctcgggcgcgctcagagcagttcatcaacctgcgagaggtcagcacccgcttccgcctgccacccggggagtatgtggtggtgccctccaccttcgagcccaacaaggagggcgacttcgtgctgcgcttcttctcagagaagagtgctgggactgtggagctggatgaccagatccaggccaatctccccgatgagcaagtgctctcagaagaggagattgacgagaacttcaaggccctcttcaggcagctggcaggggaggacatggagatcagcgtgaaggagttgcggacaatcctcaataggatcatcagcaaacacaaagacctgcggaccaagggcttcagcctagagtcgtgccgcagcatggtgaacctcatggatcgtgatggcaatgggaagctgggcctggtggagttcaacatcctgtggaaccgcatccggaattacctgtccatcttccggaagtttgacctggacaagtcgggcagcatgagtgcctacgagatgcggatggccattgagtcggcaggcttcaagctcaacaagaagctgtacgagctcatcatcacccgctactcggagcccgacctggcggtcgactttgacaatttcgtttgctgcctggtgcggctagagaccatgttccgatttttcaaaactctggacacagatctggatggagttgtgacctttgacttgtttaagtggttgcagctgaccatgtttgcatgaggcagggactcggtcccccttgccgtgctcccctccctcctcgtctgccaagcctcgcctcctaccacaccacaccaggccaccccagctgcaagtgccttccttggagcagagaggcagcctcgtcctcctgtcccctctcctcccagccaccatcgttcatctgctccgggcagaactgtgtggcccctgcctgtgccagccatgggctcgggatggactccctgggccccacccattgccaagccaggaaggcagctttcgcttgttcctgcctcgggacagccccgggtttccccagcatcctgatgtgtcccctctccccacttcagaggccacccactcagcaccaccggcctggccttgcctgcagactataaactataaccactagctcgacacagtctgcagtccaggcgtgtggagccgcctcccggctcggggaggccccggggctgggaacgcctgtgccttcctgcgccgaagccaacgccccctctgtccttccctggccctgctgccgaccaggagctgcccagcctgtgggcggtcggccttccctccttcgctccttttttatattagtgattttaaaggggactcttcagggacttgtgtactggttatgggggtgccagaggcactaggcttggggtggggaggtcccgtgttccatatagaggaaccccaaataataaaaggccccacatctgtctgtg

SEQ ID NO: 82 - protein, 714 aa, Homo sapiens
  calpain 1 large subunit
MSEEIITPVYCTGVSAQVQKQRARELGLGRHENAIKYLGQDYEQLRVRCLQSGTLFRDEAFPPVPQSLGYKDLGPNSSKTYGIKWKRPTELLSNPQFIVDGATRTDICQGALGDCWLLAAIASLTLNDTLLHRVVPHGQSFQNGYAGIFHFQLWQFGEWVDVVVDDLLPIKDGKLVFVHSAEGNEFWSALLEKAYAKVNGSYEALSGGSTSEGFEDFTGGVTEWYELRKAPSDLYQIILKALERGSLLGCSIDISSVLDMEAITFKKLVKGHAYSVTGAKQVNYRGQVVSLIRMRNPWGEVEWTGAWSDSSSEWNNVDPYERDQLRVKMEDGEFWMSFRDFMREFTRLEICNLTPDALKSRTIRKWNTTLYEGTWRRGSTAGGCRNYPATFWVNPQFKIRLDETDDPDDYGDRESGCSFVLALMQKHRRRERRFGRDMETIGFAVYEVPPELVGQPAVHLKRDFFLANASRARSEQFINLREVSTRFRLPPGEYVVVPSTFEPNKEGDFVLRFFSEKSAGTVELDDQIQANLPDEQVLSEEEIDENFKALFRQLAGEDMEISVKELRTILNRIISKHKDLRTKGFSLESCRSMVNLMDRDGNGKLGLVEFNILWNRIRNYLSIFRKFDLDKSGSMSAYEMRMAIESAGFKLNKKLYELIITRYSEPDLAVDFDNFVCCLVRLETMFRFFKTLDTDLDGVVTFDLFKWLQLTMFA

SEQ ID NO: 83 - DNA, 3492 bp, Homo sapiens
  calpain 2 large subunit precursor
caggccgcaggatggcctggtcccgggccgggagcccagcaggccgggagcggctgaggccacaccccgcgggccgggccgcttccctccggtgaatcatcgctcgcagcggcggcgcccgcagtggccgcagcagcgcgccgggccctggccgcgccccagccgagcgcagcgcggagtcgccccgacctttctctgcgcagtacggccgccgggaccgcagcatggcgggcatcgcggccaagctggcgaaggaccgggaggcggccgaggggctgggctcccacgagagggccatcaagtacctcaaccaggactacgaggcgctgcggaacgagtgcctggaggccgggacgctcttccaggacccgtccttcccggccatcccctcggccctgggcttcaaggagttggggccctactccagcaaaacccggggcatcgagtggaagcgccccacggagatctgcgctgacccccagtttatcattggaggagccacccgcacagacatctgccaaggagccctgggtgactgctggctgctggcagccattgcctccctcaccttgaatgaagaaatcctggctcgagtcgtccccctaaaccagagcttccaggaaaactatgcagggatctttcacttccagttctggcaatacggcgagtgggtggaggtggtggtggatgacaggctgcccaccaaggacggggagctgctctttgtgcattcagccgaagggagcgagttctggagcgccctgctggagaaggcatacgccaagatcaacggatgctatgaagcgctatcagggggtgccaccactgagggcttcgaagacttcaccggaggcattgctgagtggtatgagttgaagaagccccctcccaacctgttcaagatcatccagaaagctctgcaaaaaggctctctccttggctgctccatcgacatcaccagcgccgcggactcggaggccatcacgtttcagaagctggtgaaggggcacgcgtactcggtcaccggagccgaggaggttgaaagtaacggaagcctacagaaactgatccgcatccgaaatccctggggagaagtggagtggacagggcggtggaatgacaactgcccaagctggaacactatagacccagaggagagggaaaggctgaccagacggcatgaagatggagaattctggatgtctttcagtgacttcctgaggcactattcccgcctggagatctgtaacctgaccccagacactctcaccagcgatacctacaagaagtggaaactcaccaaaatggatgggaactggaggcggggctccaccgcgggaggttgcaggaactacccgaacacattctggatgaaccctcagtacctgatcaagctggaggaggaggatgaggacgaggaggatggggagagcggctgcaccttcctggtggggctcattcagaagcaccgacggcggcagaggaagatgggcgaggacatgcacaccatcggctttggcatctatgaggttccagaggagttaagtgggcagaccaacatccacctcagcaaaaacttcttcctgacgaatcgcgccagggagcgctcagacaccttcatcaacctccgggaggtgctcaaccgcttcaagctgccgccaggagagtacattctcgtgccttccaccttcgaacccaacaaggatggggatttctgcatccgggtcttttctgaaaagaaagctgactaccaagctgtcgatgatgaaatcgaggccaatcttgaagagttcgacatcagcgaggatgacattgatgatggattcaggagactgtttgcccagttggcaggagaggatgcggagatctctgcctttgagctgcagaccatcctgagaagggttctagcaaagcgccaagatatcaagtcagatggcttcagcatcgagacatgcaaaattatggttgacatgctagattcggacgggagtggcaagctggggctgaaggagttctacattctctggacgaagattcaaaaataccaaaaaatttaccgagaaatcgacgttgacaggtctggtaccatgaattcctatgaaatgcggaaggcattagaagaagcaggtttcaagatgccctgtcaactccaccaagtcatcgttgctcggtttgcagatgaccagctcatcatcgattttgataattttgttcggtgtttggttcggctggaaacgctattcaagatatttaagcagctggatcccgagaatactggaacaatagagctcgaccttatctcttggctctgtttctcagtactttgaagttataactaatctgcctgaagacttctcatgatggaaaatcagccaaggactaagcttccatagaaatacactttgtatctggacctcaaaattatgggaacatttacttaaacggatgatcatagctgaaaataatgatactgtcaatttgagatagcagaagtttcacacatcaaagtaaaagatttgcatatcattatactaaatgcaaatgagtcgcttaacccttgacaaggtcaaagaaagctttaaatctgtaaatagtatacactttttacttttacacactttcctgttcatagcaatattaaatcaggaaaaaaaaatgcagggaggtatttaacagctgagcaaaaacattgagtcgctctcaaaggacacgaggcccttggcagggaatatttaaagcaacttcaagtttaaaatgcagctgttgattctaccaaacaacagtccaagattaccatttcccatgagccaactgggaaacatggtatatcatgaagtaatcttgtcaaggcatctggagagtccaggagagaagactcacctctgtcgcttgggttaaacaagagacaggttttgtagaatattgattggtaatagtaaatcgttctccttacaatcaagttcttgaccctattcggccttatacatctggtcttacaaagaccaaagggatcctgcgcttgatcaactgaaccagtatgccaaaaccaggcatccaatttgtaaaccaattatgataaaggacaaaataagctgtttgccacctcaaaactttatgaacttcaccaccactagtgtctgtccatggagttagaggggacatcacttagaagttcttatagaaaggacacaagtttgtttcctggctttaccttgggaaaatgctagcaacattatagaaattttgccttgttgccttatcttcttccaaatgtactgttaaataaaaataaagggttaccccatgcaatcacaccatgccatgttttccttcctggagggcagccccacaggacggtttatgagcacacaattatagcttgtttctactttaacaaggtatgctgcctctgtaaattcatgtattcaaaggaaaagacaccttgcctataattaaaatgtggaactataaaattttttaaaatccaaaaaa

SEQ ID NO: 84 - protein, 700 aa, Homo sapiens
  calpain 2 large subunit precursor
MAGIAAKLAKDREAAEGLGSHERAIKYLNQDYEALRNECLEAGTLFQDPSFPAIPSALGFKELGPYSSKTRGIEWKRPTEICADPQFIIGGATRTDICQGALGDCWLLAAIASLTLNEEILARVVPLNQSFQENYAGIFHFQFWQYGEWVEVVVDDRLPTKDGELLFVHSAEGSEFWSALLEKAYAKINGCYEALSGGATTEGFEDFTGGIAEWYELKKPPPNLFKIIQKALQKGSLLGCSIDITSAADSEAITFQKLVKGHAYSVTGAEEVESNGSLQKLIRIRNPWGEVEWTGRWNDNCPSWNTIDPEERERLTRRHEDGEFWMSFSDFLRHYSRLEICNLTPDTLTSDTYKKWKLTKMDGNWRRGSTAGGCRNYPNTFWMNPQYLIKLEEEDEDEEDGESGCTFLVGLIQKHRRRQRKMGEDMHTIGFGIYEVPEELSGQTNIHLSKNFFLTNRARERSDTFINLREVLNRFKLPPGEYILVPSTFEPNKDGDFCIRVFSEKKADYQAVDDEIEANLEEFDISEDDIDDGFRRLFAQLAGEDAEISAFELQTILRRVLAKRQDIKSDGFSIETCKIMVDMLDSDGSGKLGLKEFYILWTKIQKYQKIYREIDVDRSGTMNSYEMRKALEEAGFKMPCQLHQVIVARFADDQLIIDFDNFVRCLVRLETLFKIFKQLDPENTGTIELDLISWLCFSVL

SEQ ID NO: 85 - protein, 699 aa, Homo sapiens
  calpain 2 large subunit
AGIAAKLAKDREAAEGLGSHERAIKYLNQDYEALRNECLEAGTLFQDPSFPAIPSALGFKELGPYSSKTRGIEWKRPTEICADPQFIIGGATRTDICQGALGDCWLLAAIASLTLNEEILARVVPLNQSFQENYAGIFHFQFWQYGEWVEVVVDDRLPTKDGELLFVHSAEGSEFWSALLEKAYAKINGCYEALSGGATTEGFEDFTGGIAEWYELKKPPPNLFKIIQKALQKGSLLGCSIDITSAADSEAITFQKLVKGHAYSVTGAEEVESNGSLQKLIRIRNPWGEVEWTGRWNDNCPSWNTIDPEERERLTRRHEDGEFWMSFSDFLRHYSRLEICNLTPDTLTSDTYKKWKLTKMDGNWRRGSTAGGCRNYPNTFWMNPQYLIKLEEEDEDEEDGESGCTFLVGLIQKHRRRQRKMGEDMHTIGFGIYEVPEELSGQTNIHLSKNFFLTNRARERSDTFINLREVLNRFKLPPGEYILVPSTFEPNKDGDFCIRVFSEKKADYQAVDDEIEANLEEFDISEDDIDDGFRRLFAQLAGEDAEISAFELQTILRRVLAKRQDIKSDGFSIETCKIMVDMLDSDGSGKLGLKEFYILWTKIQKYQKIYREIDVDRSGTMNSYEMRKALEEAGFKMPCQLHQVIVARFADDQLIIDFDNFVRCLVRLETLFKIFKQLDPENTGTIELDLISWLCFSVL

SEQ ID NO: 86 - DNA, 1492 bp, Homo sapiens
  calpain small subunit 1
cgggcgacagcagggccgcggtgcagtgtccgacccgagagttgcggcctgagtcaccggccccgccctccggagccggacgctgcgggaggcccgggagcggcagtggaaccgactcccagaactccggacgtgtgcggcgcagtgagtcgcagccatgttcctggttaactcgttcttgaagggcggcggcggcggcggcgggggaggcgggggcctgggtgggggcctgggaaatgtgcttggaggcctgatcagcggggccgggggcggcggcggcggcggcggcggcggcggcggtggtggaggcggcggtggcggtggaacggccatgcgcatcctaggcggagtcatcagcgccatcagcgaggcggctgcgcagtacaacccggagcccccgcccccacgcacacattactccaacattgaggccaacgagagtgaggaggtccggcagttccggagactctttgcccagctggctggagatgacatggaggtcagcgccacagaactcatgaacattctcaataaggttgtgacacgacaccctgatctgaagactgatggttttggcattgacacatgtcgcagcatggtggccgtgatggatagcgacaccacaggcaagctgggctttgaggaattcaagtacttgtggaacaacatcaaaaggtggcaggccatatacaaacagttcgacactgaccgatcagggaccatttgcagtagtgaactcccaggtgcctttgaggcagcagggttccacctgaatgagcatctctataacatgatcatccgacgctactcagatgaaagtgggaacatggattttgacaacttcatcagctgcttggtcaggctggacgccatgttccgtgccttcaaatctcttgacaaagatggcactggacaaatccaggtgaacatccaggagtggctgcagctgactatgtattcctgaactggagccccagacccgccccctcactgccttgctataggagtcacctggagcctcggtctctcccagggccgatcctgtctgcagtcacatctttgtggggcctgctgacccacaagcttttgttctctcagtacttgttacccagcttctcaacatccagggcccaatttgccctgcctggagttccccctggctctaggacactctaacaagctctgtccacgggtctccccattcccaccaggccctgcacacacccactccgtaacctctcccctgtacctgtgccaagcctagcacttgtgatgcctccatgccccgagggccctctctcagttctgggaggatgactccagtccctgcacgccctggcacacccttcacggttgctacccaggcggccaagctccagaccgtgccagacccaggtgccccagtgcctttgtctatattctgctcccagcctgccaggcccaggaggaaataaacatgccccagttgctgatctctaaaaaaaaaaaaaaa

SEQ ID NO: 87 - protein, 268 aa, Homo sapiens
  calpain small subunit 1
MFLVNSFLKGGGGGGGGGGGLGGGLGNVLGGLISGAGGGGGGGGGGGGGGGGGGGGTAMRILGGVISAISEAAAQYNPEPPPPRTHYSNIEANESEEVRQFRRLFAQLAGDDMEVSATELMNILNKVVTRHPDLKTDGFGIDTCRSMVAVMDSDTTGKLGFEEFKYLWNNIKRWQAIYKQFDTDRSGTICSSELPGAFEAAGFHLNEHLYNMIIRRYSDESGNMDFDNFISCLVRLDAMFRAFKSLDKDGTGQIQVNIQEWLQLTMYS

SEQ ID NO: 88 - DNA, 2205 bp, Homo sapiens
  cathepsin D precursor
gcgcacgccggccgcgcccacgtgaccggtccgggtgcaaacacgcgggtcagctgatccggcccaactgcggcgtcatcccggctataagcgcacggcctcggcgaccctctccgacccggccgccgccgccatgcagccctccagccttctgccgctcgccctctgcctgctggctgcacccgcctccgcgctcgtcaggatcccgctgcacaagttcacgtccatccgccggaccatgtcggaggttgggggctctgtggaggacctgattgccaaaggccccgtctcaaagtactcccaggcggtgccagccgtgaccgaggggcccattcccgaggtgctcaagaactacatggacgcccagtactacggggagattggcatcgggacgcccccccagtgcttcacagtcgtcttcgacacgggctcctccaacctgtgggtcccctccatccactgcaaactgctggacatcgcttgctggatccaccacaagtacaacagcgacaagtccagcacctacgtgaagaatggtacctcgtttgacatccactatggctcgggcagcctctccgggtacctgagccaggacactgtgtcggtgccctgccagtcagcgtcgtcagcctctgccctgggcggtgtcaaagtggagaggcaggtctttggggaggccaccaagcagccaggcatcaccttcatcgcagccaagttcgatggcatcctgggcatggcctacccccgcatctccgtcaacaacgtgctgcccgtcttcgacaacctgatgcagcagaagctggtggaccagaacatcttctccttctacctgagcagggacccagatgcgcagcctgggggtgagctgatgctgggtggcacagactccaagtattacaagggttctctgtcctacctgaatgtcacccgcaaggcctactggcaggtccacctggaccaggtggaggtggccagcgggctgaccctgtgcaaggagggctgtgaggccattgtggacacaggcacttccctcatggtgggcccggtggatgaggtgcgcgagctgcagaaggccatcggggccgtgccgctgattcagggcgagtacatgatcccctgtgagaaggtgtccaccctgcccgcgatcacactgaagctgggaggcaaaggctacaagctgtccccagaggactacacgctcaaggtgtcgcaggccgggaagaccctctgcctgagcggcttcatgggcatggacatcccgccacccagcgggccactctggatcctgggcgacgtcttcatcggccgctactacactgtgtttgaccgtgacaacaacagggtgggcttcgccgaggctgcccgcctctagttcccaaggcgtccgcgcgccagcacagaaacagaggagagtcccagagcaggaggcccctggcccagcggcccctcccacacacacccacacactcgcccgcccactgtcctgggcgccctggaagccggcggcccaagcccgacttgctgttttgttctgtggttttcccctccctgggttcagaaatgctgcctgcctgtctgtctctccatctgtttggtgggggtagagctgatccagagcacagatctgtttcgtgcattggaagaccccacccaagcttggcagccgagctcgtgtatcctggggctcccttcatctccagggagtcccctccccggccctaccagcgcccgctgggctgagcccctaccccacaccaggccgtcctcccgggccctcccttggaaacctgccctgcctgagggcccctctgcccagcttgggcccagctgggctctgccaccctacctgttcagtgtcccgggcccgttgaggatgaggccgctagaggcctgaggatgagctggaaggagtgagaggggacaaaacccaccttgttggagcctgcagggtggtgctgggactgagccagtcccaggggcatgtattggcctggaggtggggttgggattgggggctggtgccagccttcctctgcagctgacctctgttgtcctccccttgggcggctgagagccccagctgacatggaaatacagttgttggcctccggcctcccctcaaaaaaaaaaaaaaaaaaaaaaaaaaaaaaaaaaaaaaaaaaaaaaaaaaaaaaaaaaaaaaaaaaaaaaaaaaaaaaaaaaaaa

SEQ ID NO: 89 - protein, 412 aa, Homo sapiens
  cathepsin D precursor
MQPSSLLPLALCLLAAPASALVRIPLHKFTSIRRTMSEVGGSVEDLIAKGPVSKYSQAVPAVTEGPIPEVLKNYMDAQYYGEIGIGTPPQCFTVVFDTGSSNLWVPSIHCKLLDIACWIHHKYNSDKSSTYVKNGTSFDIHYGSGSLSGYLSQDTVSVPCQSASSASALGGVKVERQVFGEATKQPGITFIAAKFDGILGMAYPRISVNNVLPVFDNLMQQKLVDQNIFSFYLSRDPDAQPGGELMLGGTDSKYYKGSLSYLNVTRKAYWQVHLDQVEVASGLTLCKEGCEAIVDTGTSLMVGPVDEVRELQKAIGAVPLIQGEYMIPCEKVSTLPAITLKLGGKGYKLSPEDYTLKVSQAGKTLCLSGFMGMDIPPPSGPLWILGDVFIGRYYTVFDRDNNRVGFAEAARL

SEQ ID NO: 90 - protein, 348 aa, Homo sapiens
  cathepsin D mature
GPIPEVLKNYMDAQYYGEIGIGTPPQCFTVVFDTGSSNLWVPSIHCKLLDIACWIHHKYNSDKSSTYVKNGTSFDIHYGSGSLSGYLSQDTVSVPCQSASSASALGGVKVERQVFGEATKQPGITFIAAKFDGILGMAYPRISVNNVLPVFDNLMQQKLVDQNIFSFYLSRDPDAQPGGELMLGGTDSKYYKGSLSYLNVTRKAYWQVHLDQVEVASGLTLCKEGCEAIVDTGTSLMVGPVDEVRELQKAIGAVPLIQGEYMIPCEKVSTLPAITLKLGGKGYKLSPEDYTLKVSQAGKTLCLSGFMGMDIPPPSGPLWILGDVFIGRYYTVFDRDNNRVGFAEAARL

SEQ ID NO: 91 - DNA, 2228 bp, Homo sapiens
  cathepsin e transcript variant 1
atcattcggccctcagactgggctgggcaggtctgagagttagggaaagtccgttcccactgccctcggggagagaagaaaggagggggcaagggagaagctgctggtcggactcacaatgaaaacgctccttcttttgctgctggtgctcctggagctgggagaggcccaaggatcccttcacagggtgcccctcaggaggcatccgtccctcaagaagaagctgcgggcacggagccagctctctgagttctggaaatcccataatttggacatgatccagttcaccgagtcctgctcaatggaccagagtgccaaggaacccctcatcaactacttggatatggaatacttcggcactatctccattggctccccaccacagaacttcactgtcatcttcgacactggctcctccaacctctgggtcccctctgtgtactgcactagcccagcctgcaagacgcacagcaggttccagccttcccagtccagcacatacagccagccaggtcaatctttctccattcagtatggaaccgggagcttgtccgggatcattggagccgaccaagtctctgtggaaggactaaccgtggttggccagcagtttggagaaagtgtcacagagccaggccagacctttgtggatgcagagtttgatggaattctgggcctgggatacccctccttggctgtgggaggagtgactccagtatttgacaacatgatggctcagaacctggtggacttgccgatgttttctgtctacatgagcagtaacccagaaggtggtgcggggagcgagctgatttttggaggctacgaccactcccatttctctgggagcctgaattgggtcccagtcaccaagcaagcttactggcagattgcactggataacatccaggtgggaggcactgttatgttctgctccgagggctgccaggccattgtggacacagggacttccctcatcactggcccttccgacaagattaagcagctgcaaaacgccattggggcagcccccgtggatggagaatatgctgtggagtgtgccaaccttaacgtcatgccggatgtcaccttcaccattaacggagtcccctataccctcagcccaactgcctacaccctactggacttcgtggatggaatgcagttctgcagcagtggctttcaaggacttgacatccaccctccagctgggcccctctggatcctgggggatgtcttcattcgacagttttactcagtctttgaccgtgggaataaccgtgtgggactggccccagcagtcccctaaggaggggccttgtgtctgtgcctgcctgtctgacagaccttgaatatgttaggctggggcattctttacacctacaaaaagttattttccagagaatgtagctgtttccagggttgcaacttgaattaagaccaaacagaacatgagaatacacacacacacacacatatacacacacacacacttcacacatacacaccactcccaccaccgtcatgatggaggaattacgttatacattcatattttgtattgatttttgattatgaaaatcaaaaattttcacatttgattatgaaaatctccaaacatatgcacaagcagagatcatggtataataaatccctttgcaactccactcagccctgacaacccatccacacacggccaggcctgtttatctacactgctgcccactcctctctccagctccacatgctgtacctggatcattctgaagcaaattccgagcattacatcattttgtccataaatatttctaacatccttaaatatacaatcggaattcaagcatctcccattgtcccacaaatgtttggctgtttttgtagttggattgtttgtattaggattcaagcaaggcccatatattgcatttatttgaaatgtctgtaagtctctttccatctacagagtttagcacatttgaacgttgctggttgaaatcccgaggtgtcatttgacatggttctctgaacttatctttcctataaaatggtagttagatctggaggtctgattttgtggcaaaaatacttcctaggtggtgctgggtacttcttgttgcatcctgtcaggaggcagataatgctggtgcctctctattggtaatgttaagactgctgggtgggtttggagttcttggctttaatcattcattacaaagttcagcatttta

SEQ ID NO: 92 - protein, 396 aa, Homo sapiens
  cathepsin E isoform a precursor
MKTLLLLLLVLLELGEAQGSLHRVPLRRHPSLKKKLRARSQLSEFWKSHNLDMIQFTESCSMDQSAKEPLINYLDMEYFGTISIGSPPQNFTVIFDTGSSNLWVPSVYCTSPACKTHSRFQPSQSSTYSQPGQSFSIQYGTGSLSGIIGADQVSVEGLTVVGQQFGESVTEPGQTFVDAEFDGILGLGYPSLAVGGVTPVFDNMMAQNLVDLPMFSVYMSSNPEGGAGSELIFGGYDHSHFSGSLNWVPVTKQAYWQIALDNIQVGGTVMFCSEGCQAIVDTGTSLITGPSDKIKQLQNAIGAAPVDGEYAVECANLNVMPDVTFTINGVPYTLSPTAYTLLDFVDGMQFCSSGFQGLDIHPPAGPLWILGDVFIRQFYSVFDRGNNRVGLAPAVP

SEQ ID NO: 93 - protein, 343 aa, Homo sapiens
  cathepsin E isoform a mature
IQFTESCSMDQSAKEPLINYLDMEYFGTISIGSPPQNFTVIFDTGSSNLWVPSVYCTSPACKTHSRFQPSQSSTYSQPGQSFSIQYGTGSLSGIIGADQVSVEGLTVVGQQFGESVTEPGQTFVDAEFDGILGLGYPSLAVGGVTPVFDNMMAQNLVDLPMFSVYMSSNPEGGAGSELIFGGYDHSHFSGSLNWVPVTKQAYWQIALDNIQVGGTVMFCSEGCQAIVDTGTSLITGPSDKIKQLQNAIGAAPVDGEYAVECANLNVMPDVTFTINGVPYTLSPTAYTLLDFVDGMQFCSSGFQGLDIHPPAGPLWILGDVFIRQFYSVFDRGNNRVGLAPAVP

SEQ ID NO: 94 - DNA, 2086 bp, Homo sapiens
  cathepsin E  transcript variant 2
atcattcggccctcagactgggctgggcaggtctgagagttagggaaagtccgttcccactgccctcggggagagaagaaaggagggggcaagggagaagctgctggtcggactcacaatgaaaacgctccttcttttgctgctggtgctcctggagctgggagaggcccaaggatcccttcacagggtgcccctcaggaggcatccgtccctcaagaagaagctgcgggcacggagccagctctctgagttctggaaatcccataatttggacatgatccagttcaccgagtcctgctcaatggaccagagtgccaaggaacccctcatcaactacttggatatggaatacttcggcactatctccattggctccccaccacagaacttcactgtcatcttcgacactggctcctccaacctctgggtcccctctgtgtactgcactagcccagcctgcaagacgcacagcaggttccagccttcccagtccagcacatacagccagccaggtcaatctttctccattcagtatggaaccgggagcttgtccgggatcattggagccgaccaagtctctgtggaaggactaaccgtggttggccagcagtttggagaaagtgtcacagagccaggccagacctttgtggatgcagagtttgatggaattctgggcctgggatacccctccttggctgtgggaggagtgactccagtatttgacaacatgatggctcagaacctggtggacttgccgatgttttctgtctacatgagcagtaacccagaaggtggtgcggggagcgagctgatttttggaggctacgaccactcccatttctctgggagcctgaattgggtcccagtcaccaagcaagcttactggcagattgcactggataatatgctgtggagtgtgccaaccttaacgtcatgccggatgtcaccttcaccattaacggagtcccctataccctcagcccaactgcctacaccctactggacttcgtggatggaatgcagttctgcagcagtggctttcaaggacttgacatccaccctccagctgggcccctctggatcctgggggatgtcttcattcgacagttttactcagtctttgaccgtgggaataaccgtgtgggactggccccagcagtcccctaaggaggggccttgtgtctgtgcctgcctgtctgacagaccttgaatatgttaggctggggcattctttacacctacaaaaagttattttccagagaatgtagctgtttccagggttgcaacttgaattaagaccaaacagaacatgagaatacacacacacacacacatatacacacacacacacttcacacatacacaccactcccaccaccgtcatgatggaggaattacgttatacattcatattttgtattgatttttgattatgaaaatcaaaaattttcacatttgattatgaaaatctccaaacatatgcacaagcagagatcatggtataataaatccctttgcaactccactcagccctgacaacccatccacacacggccaggcctgtttatctacactgctgcccactcctctctccagctccacatgctgtacctggatcattctgaagcaaattccgagcattacatcattttgtccataaatatttctaacatccttaaatatacaatcggaattcaagcatctcccattgtcccacaaatgtttggctgtttttgtagttggattgtttgtattaggattcaagcaaggcccatatattgcatttatttgaaatgtctgtaagtctctttccatctacagagtttagcacatttgaacgttgctggttgaaatcccgaggtgtcatttgacatggttctctgaacttatctttcctataaaatggtagttagatctggaggtctgattttgtggcaaaaatacttcctaggtggtgctgggtacttcttgttgcatcctgtcaggaggcagataatgctggtgcctctctattggtaatgttaagactgctgggtgggtttggagttcttggctttaatcattcattacaaagttcagcatttta

SEQ ID NO: 95 - protein, 363 aa, Homo sapiens
  cathepsin E isoform B precursor
MKTLLLLLLVLLELGEAQGSLHRVPLRRHPSLKKKLRARSQLSEFWKSHNLDMIQFTESCSMDQSAKEPLINYLDMEYFGTISIGSPPQNFTVIFDTGSSNLWVPSVYCTSPACKTHSRFQPSQSSTYSQPGQSFSIQYGTGSLSGIIGADQVSVEGLTVVGQQFGESVTEPGQTFVDAEFDGILGLGYPSLAVGGVTPVFDNMMAQNLVDLPMFSVYMSSNPEGGAGSELIFGGYDHSHFSGSLNWVPVTKQAYWQIALDNMLWSVPTLTSCRMSPSPLTESPIPSAQLPTPYWTSWMECSSAAVAFKDLTSTLQLGPSGSWGMSSFDSFTQSLTVGITVWDWPQQSPKEGPCVCACLSDRP

SEQ ID NO: 96 - protein, 310 aa, Homo sapiens
  cathepsin E isoform b mature
IQFTESCSMDQSAKEPLINYLDMEYFGTISIGSPPQNFTVIFDTGSSNLWVPSVYCTSPACKTHSRFQPSQSSTYSQPGQSFSIQYGTGSLSGIIGADQVSVEGLTVVGQQFGESVTEPGQTFVDAEFDGILGLGYPSLAVGGVTPVFDNMMAQNLVDLPMFSVYMSSNPEGGAGSELIFGGYDHSHFSGSLNWVPVTKQAYWQIALDNMLWSVPTLTSCRMSPSPLTESPIPSAQLPTPYWTSWMECSSAAVAFKDLTSTLQLGPSGSWGMSSFDSFTQSLTVGITVWDWPQQSPKEGPCVCACLSDRP

SEQ ID NO: 97 - DNA, 1973 bp, Homo sapiens
  MMP-1 precursor
gggatattggagtagcaagaggctgggaagccatcacttaccttgcactgagaaagaagacaaaggccagtatgcacagctttcctccactgctgctgctgctgttctggggtgtggtgtctcacagcttcccagcgactctagaaacacaagagcaagatgtggacttagtccagaaatacctggaaaaatactacaacctgaagaatgatgggaggcaagttgaaaagcggagaaatagtggcccagtggttgaaaaattgaagcaaatgcaggaattctttgggctgaaagtgactgggaaaccagatgctgaaaccctgaaggtgatgaagcagcccagatgtggagtgcctgatgtggctcagtttgtcctcactgaggggaaccctcgctgggagcaaacacatctgacctacaggattgaaaattacacgccagatttgccaagagcagatgtggaccatgccattgagaaagccttccaactctggagtaatgtcacacctctgacattcaccaaggtctctgagggtcaagcagacatcatgatatcttttgtcaggggagatcatcgggacaactctccttttgatggacctggaggaaatcttgctcatgcttttcaaccaggcccaggtattggaggggatgctcattttgatgaagatgaaaggtggaccaacaatttcagagagtacaacttacatcgtgttgcggctcatgaactcggccattctcttggactctcccattctactgatatcggggctttgatgtaccctagctacaccttcagtggtgatgttcagctagctcaggatgacattgatggcatccaagccatatatggacgttcccaaaatcctgtccagcccatcggcccacaaaccccaaaagcgtgtgacagtaagctaacctttgatgctataactacgattcggggagaagtgatgttctttaaagacagattctacatgcgcacaaatcccttctacccggaagttgagctcaatttcatttctgttttctggccacaactgccaaatgggcttgaagctgcttacgaatttgccgacagagatgaagtccggtttttcaaagggaataagtactgggctgttcagggacagaatgtgctacacggataccccaaggacatctacagctcctttggcttccctagaactgtgaagcatatcgatgctgctctttctgaggaaaacactggaaaaacctacttctttgttgctaacaaatactggaggtatgatgaatataaacgatctatggatccaggttatcccaaaatgatagcacatgactttcctggaattggccacaaagttgatgcagttttcatgaaagatggatttttctatttctttcatggaacaagacaatacaaatttgatcctaaaacgaagagaattttgactctccagaaagctaatagctggttcaactgcaggaaaaattgaacattactaatttgaatggaaaacacatggtgtgagtccaaagaaggtgttttcctgaagaactgtctattttctcagtcatttttaacctctagagtcactgatacacagaatataatcttatttatacctcagtttgcatatttttttactatttagaatgtagccctttttgtactgatataatttagttccacaaatggtgggtacaaaaagtcaagtttgtggcttatggattcatataggccagagttgcaaagatcttttccagagtatgcaactctgacgttgatcccagagagcagcttcagtgacaaacatatcctttcaagacagaaagagacaggagacatgagtctttgccggaggaaaagcagctcaagaacacatgtgcagtcactggtgtcaccctggataggcaagggataactcttctaacacaaaataagtgttttatgtttggaataaagtcaaccttgtttctactgtttt

SEQ ID NO: 98 - protein, 469 aa, Homo sapiens
  MMP-1 precursor
MHSFPPLLLLLFWGVVSHSFPATLETQEQDVDLVQKYLEKYYNLKNDGRQVEKRRNSGPVVEKLKQMQEFFGLKVTGKPDAETLKVMKQPRCGVPDVAQFVLTEGNPRWEQTHLTYRIENYTPDLPRADVDHAIEKAFQLWSNVTPLTFTKVSEGQADIMISFVRGDHRDNSPFDGPGGNLAHAFQPGPGIGGDAHFDEDERWTNNFREYNLHRVAAHELGHSLGLSHSTDIGALMYPSYTFSGDVQLAQDDIDGIQAIYGRSQNPVQPIGPQTPKACDSKLTFDAITTIRGEVMFFKDRFYMRTNPFYPEVELNFISVFWPQLPNGLEAAYEFADRDEVRFFKGNKYWAVQGQNVLHGYPKDIYSSFGFPRTVKHIDAALSEENTGKTYFFVANKYWRYDEYKRSMDPGYPKMIAHDFPGIGHKVDAVFMKDGFFYFFHGTRQYKFDPKTKRILTLQKANSWFNCRKN

SEQ ID NO: 99 - protein, 370 aa, Homo sapiens
  MMP-1 mature
FVLTEGNPRWEQTHLTYRIENYTPDLPRADVDHAIEKAFQLWSNVTPLTFTKVSEGQADIMISFVRGDHRDNSPFDGPGGNLAHAFQPGPGIGGDAHFDEDERWTNNFREYNLHRVAAHELGHSLGLSHSTDIGALMYPSYTFSGDVQLAQDDIDGIQAIYGRSQNPVQPIGPQTPKACDSKLTFDAITTIRGEVMFFKDRFYMRTNPFYPEVELNFISVFWPQLPNGLEAAYEFADRDEVRFFKGNKYWAVQGQNVLHGYPKDIYSSFGFPRTVKHIDAALSEENTGKTYFFVANKYWRYDEYKRSMDPGYPKMIAHDFPGIGHKVDAVFMKDGFFYFFHGTRQYKFDPKTKRILTLQKANSWFNCRKN

SEQ ID NO: 100 - DNA, 2223 bp, Homo sapiens
  MMP-8 precursor
gctcgccagggaagggccctacccagaggacagaaagaaagccaggaggggtagagtttgaagagaagatcatgttctccctgaagacgcttccatttctgctcttactccatgtgcagatttccaaggcctttcctgtatcttctaaagagaaaaatacaaaaactgttcaggactacctggaaaagttctaccaattaccaagcaaccagtatcagtctacaaggaagaatggcactaatgtgatcgttgaaaagcttaaagaaatgcagcgattttttgggttgaatgtgacggggaagccaaatgaggaaactctggacatgatgaaaaagcctcgctgtggagtgcctgacagtggtggttttatgttaaccccaggaaaccccaagtgggaacgcactaacttgacctacaggattcgaaactataccccacagctgtcagaggctgaggtagaaagagctatcaaggatgcctttgaactctggagtgttgcatcacctctcatcttcaccaggatctcacagggagaggcagatatcaacattgctttttaccaaagagatcacggtgacaattctccatttgatggacccaatggaatccttgctcatgcctttcagccaggccaaggtattggaggagatgctcattttgatgccgaagaaacatggaccaacacctccgcaaattacaacttgtttcttgttgctgctcatgaatttggccattctttggggctcgctcactcctctgaccctggtgccttgatgtatcccaactatgctttcagggaaaccagcaactactcactccctcaagatgacatcgatggcattcaggccatctatggactttcaagcaaccctatccaacctactggaccaagcacacccaaaccctgtgaccccagtttgacatttgatgctatcaccacactccgtggagaaatacttttctttaaagacaggtacttctggagaaggcatcctcagctacaaagagtcgaaatgaattttatttctctattctggccatcccttccaactggtatacaggctgcttatgaagattttgacagagacctcattttcctatttaaaggcaaccaatactgggctctgagtggctatgatattctgcaaggttatcccaaggatatatcaaactatggcttccccagcagcgtccaagcaattgacgcagctgttttctacagaagtaaaacatacttctttgtaaatgaccaattctggagatatgataaccaaagacaattcatggagccaggttatcccaaaagcatatcaggtgcctttccaggaatagagagtaaagttgatgcagttttccagcaagaacatttcttccatgtcttcagtggaccaagatattacgcatttgatcttattgctcagagagttaccagagttgcaagaggcaataaatggcttaactgtagatatggctgaagcaaaatcaaatgtggctgtatccactttcagaatgttgaagggaagttcagcatgcattttcgttacattgtgtcctgcttatacttttctcaatattaagtcattgtttcccatcactgtatccattctacctgtcctccgtgaaaatatgtttggaatattccactatttgcagaggcttattcagttcttacacattccatcttacattagtgattccatcaaagagaaggaaagtaagcctttttgtcacctcaatatttactatttcaatacttacatatctgacttctaggatttattgttatattacttgcctatctgacttcatacatccctcagtttcttaaaatgtcctatgtatatcttctacatgcaatttagaactagattttggttagaagtaaggattataaacaacctagacagtacccttggcctttacagaaaatatggtgctgttttctacccttggaaagaaatgtagatgatatgtttcgtgggttgaattgtgtcccccataaaagatatgttgaagttctaaccccaggtacccatgaatgtgagcttaccagggtctttgcagatgtaattagttaagttaaggtgagatcacactgaattagggtgggctctaaatccattatgactgttgttcttataagaagaagagagcatagccacctaggggaggaggccgtgtgaagacagaggcagagattggagtgacgcatctccaagccaa

SEQ ID NO: 101 - protein, 467 aa, Homo sapiens [sequence omitted]

SEQ ID NO: 102 - protein, 367 aa, Homo sapiens
  MMP-8 mature
LTPGNPKWERTNLTYRIRNYTPQLSEAEVERAIKDAFELWSVASPLIFTRISQGEADINIAFYQRDHGDNSPFDGPNGILAHAFQPGQGIGGDAHFDAEETWTNTSANYNLFLVAAHEFGHSLGLAHSSDPGALMYPNYAFRETSNYSLPQDDIDGIQAIYGLSSNPIQPTGPSTPKPCDPSLTFDAITTLRGEILFFKDRYFWRRHPQLQRVEMNFISLFWPSLPTGIQAAYEDFDRDLIFLFKGNQYWALSGYDILQGYPKDISNYGFPSSVQAIDAAVFYRSKTYFFVNDQFWRYDNQRQFMEPGYPKSISGAFPGIESKVDAVFQQEHFFHVFSGPRYYAFDLIAQRVTRVARGNKWLNCRYG

SEQ ID NO: 103 - DNA, 2722 bp, Homo sapiens
  MMP-13 precursor
caacagtccccaggcatcaccattcaagatgcatccaggggtcctggctgccttcctcttcttgagctggactcattgtcgggccctgccccttcccagtggtggtgatgaagatgatttgtctgaggaagacctccagtttgcagagcgctacctgagatcatactaccatcctacaaatctcgcgggaatcctgaaggagaatgcagcaagctccatgactgagaggctccgagaaatgcagtctttcttcggcttagaggtgactggcaaacttgacgataacaccttagatgtcatgaaaaagccaagatgcggggttcctgatgtgggtgaatacaatgttttccctcgaactcttaaatggtccaaaatgaatttaacctacagaattgtgaattacacccctgatatgactcattctgaagtcgaaaaggcattcaaaaaagccttcaaagtttggtccgatgtaactcctctgaattttaccagacttcacgatggcattgctgacatcatgatctcttttggaattaaggagcatggcgacttctacccatttgatgggccctctggcctgctggctcatgcttttcctcctgggccaaattatggaggagatgcccattttgatgatgatgaaacctggacaagtagttccaaaggctacaacttgtttcttgttgctgcgcatgagttcggccactccttaggtcttgaccactccaaggaccctggagcactcatgtttcctatctacacctacaccggcaaaagccactttatgcttcctgatgacgatgtacaagggatccagtctctctatggtccaggagatgaagaccccaaccctaaacatccaaaaacgccagacaaatgtgacccttccttatcccttgatgccattaccagtctccgaggagaaacaatgatctttaaagacagattcttctggcgcctgcatcctcagcaggttgatgcggagctgtttttaacgaaatcattttggccagaacttcccaaccgtattgatgctgcatatgagcacccttctcatgacctcatcttcatcttcagaggtagaaaattttgggctcttaatggttatgacattctggaaggttatcccaaaaaaatatctgaactgggtcttccaaaagaagttaagaagataagtgcagctgttcactttgaggatacaggcaagactctcctgttctcaggaaaccaggtctggagatatgatgatactaaccatattatggataaagactatccgagactaatagaagaagacttcccaggaattggtgataaagtagatgctgtctatgagaaaaatggttatatctattttttcaacggacccatacagtttgaatacagcatctggagtaaccgtattgttcgcgtcatgccagcaaattccattttgtggtgttaagtgtctttttaaaaattgttatttaaatcctgaagagcatttggggtaatacttccagaagtgcggggtaggggaagaagagctatcaggagaaagcttggttctgtgaacaagcttcagtaagttatctttgaatatgtagtatctatatgactatgcgtggctggaaccacattgaagaatgttagagtaatgaaatggaggatctctaaagagcatctgattcttgttgctgtacaaaagcaatggttgatgatacttcccacaccacaaatgggacacatggtctgtcaatgagagcataatttaaaaatatatttataaggaaattttacaagggcataaagtaaatacatgcatataatgaataaatcattcttactaaaaagtataaaatagtatgaaaatggaaatttgggagagccatacataaaagaaataaaccaaaggaaaatgtctgtaataatagactgtaacttccaaataaataattttcattttgcactgaggatattcagatgtatgtgcccttcttcacacagacactaacgaaatatcaaagtcattaaagacaggagacaaaagagcagtggtaagaatagtagatgtggcctttgaattctgtttaattttcacttttggcaatgactcaaagtctgctctcatataagacaaatattcctttgcatattataaaggataaagaaggatgatgtctttttattaaaatatttcaggttcttcagaagtcacacattacaaagttaaaattgttatcaaaatagtctaaggccatggcatccctttttcataaattatttgattatttaagactaaaagttgcattttaaccctattttacctagctaattatttaattgtccggtttgtcttggatatataggctattttctaaagacttgtatagcatgaaataaaatatatcttataaagtggaagtatgtatattaaaaaagagacatccaaatttttttttaaagcagtctactagattgtgatcccttgagatatggaaggatgcctttttttctctgcatttaaaaaaatcccccagcacttcccacagtgcctattgatacttggggagggtgcttggcacttattgaatatatgatcggccatcaagggaagaactattgtgctcagagacactgttgataaaaactcaggcaaagaaaatgaaatgcatatttgcaaagtgtattaggaagtgtttatgttgtttataataaaaatatattttcaacagaaaaaaaa

SEQ ID NO: 104 - protein, 471 aa, Homo sapiens
  MMP-13 precursor
MHPGVLAAFLFLSWTHCRALPLPSGGDEDDLSEEDLQFAERYLRSYYHPTNLAGILKENAASSMTERLREMQSFFGLEVTGKLDDNTLDVMKKPRCGVPDVGEYNVFPRTLKWSKMNLTYRIVNYTPDMTHSEVEKAFKKAFKVWSDVTPLNFTRLHDGIADIMISFGIKEHGDFYPFDGPSGLLAHAFPPGPNYGGDAHFDDDETWTSSSKGYNLFLVAAHEFGHSLGLDHSKDPGALMFPIYTYTGKSHFMLPDDDVQGIQSLYGPGDEDPNPKHPKTPDKCDPSLSLDAITSLRGETMIFKDRFFWRLHPQQVDAELFLTKSFWPELPNRIDAAYEHPSHDLIFIFRGRKFWALNGYDILEGYPKKISELGLPKEVKKISAAVHFEDTGKTLLFSGNQVWRYDDTNHIMDKDYPRLIEEDFPGIGDKVDAVYEKNGYIYFFNGPIQFEYSIWSNRIVRVMPANSILWC

SEQ ID NO: 105 - protein, 368 aa, Homo sapiens
  MMP-13 mature
YNVFPRTLKWSKMNLTYRIVNYTPDMTHSEVEKAFKKAFKVWSDVTPLNFTRLHDGIADIMISFGIKEHGDFYPFDGPSGLLAHAFPPGPNYGGDAHFDDDETWTSSSKGYNLFLVAAHEFGHSLGLDHSKDPGALMFPIYTYTGKSHFMLPDDDVQGIQSLYGPGDEDPNPKHPKTPDKCDPSLSLDAITSLRGETMIFKDRFFWRLHPQQVDAELFLTKSFWPELPNRIDAAYEHPSHDLIFIFRGRKFWALNGYDILEGYPKKISELGLPKEVKKISAAVHFEDTGKTLLFSGNQVWRYDDTNHIMDKDYPRLIEEDFPGIGDKVDAVYEKNGYIYFFNGPIQFEYSIWSNRIVRVMPANSILWC

SEQ ID NO: 106 - DNA, 1609 bp, Xenopus laevis
  MMP-18
accttcaaatcctagaaagccttagaagaatgaacagcctcctgctaaagctgctactatgtgtagccattactgctgccttcccagcagataaacaagatgagcccccagcaacaaaggaagaaatggcagagaattacttgaagagattttacagtcttggaactgatgggggaccagttggaagaaagaaacacatccaacctttcactgaaaagctcgagcagatgcagaagttttttggcttaaaggtgacaggaacattggaccccaagactgtagaagtaatggagaaacccagatgtggagtctatgatgttggccagtacagcacagtcgcaaaaagttctgcatggcagaagaaggatctgacctacagaattctaaacttcactcctgacctgcctcaggctgatgtggagactgccatacaaagagctttcaaagtctggagtgacgtgacacctttgacctttaccagaatctacaatgaagtatcagatatagaaatctcctttacagctggagatcacaaagacaattctccttttgatggatctggtggcattttggcccatgcctttcagcccggcaatggcattggtggagatgcccattttgatgaagatgaaacctggacaaagaccagtgaaatatacaatctgtttcttgttgctgctcatgaatttggacactcgctggggctttctcattccactgatcagggtgctttgatgtatccaacatactcaaataccgaccccaagacatttcagcttcctcaagatgatatcaatgctatacagtatctatatggaaaatcctccaatccagtccaaccaaccggaccatccactccttccagatgtgatccaaatgttgttttcaatgctgtcaccaccatgagaggagaactgattttctttgtgaagaggtttttatggaggaagcatccccaagcatccgaggctgaactcatgtttgttcaagcattctggccatcgctgcccactaatattgatgcggcgtatgaaaatcctataacggagcagatccttgtgtttaaaggatcaaaatatacagctctggacggcttcgatgtagtacaaggttaccccaggaacatctacagcctgggatttccaaagaccgtgaaaagaattgatgcggctgttcatattgaacaactagggaaaacatatttctttgcagctaagaaatactggagttatgatgaagataaaaaacaaatggacaaaggctttccaaagcaaataagcaacgatttcccgggaattcctgataaaattgatgcagctttttattacagaggccgcctgtatttcttcattggaaggagccagtttgaatacaatatcaactctaaaagaatcgtacaggtcttaagaagcaacagctggttgggctgttaataagacggaccccaagctctgtaacaagggcaacgatgaatgtgatggcagctcatttctgcacctgccgtgtgaccaatattatttaaaatcatttcctttgaatgtttgactttatttaatctttatgaattaatattttgtactcatgttgttttaataaaaacgttttgttt

SEQ ID NO: 107 - protein, 467 aa, Xenopus laevis
  MMP-18
MNSLLLKLLLCVAITAAFPADKQDEPPATKEEMAENYLKRFYSLGTDGGPVGRKKHIQPFTEKLEQMQKFFGLKVTGTLDPKTVEVMEKPRCGVYDVGQYSTVAKSSAWQKKDLTYRILNFTPDLPQADVETAIQRAFKVWSDVTPLTFTRIYNEVSDIEISFTAGDHKDNSPFDGSGGILAHAFQPGNGIGGDAHFDEDETWTKTSEIYNLFLVAAHEFGHSLGLSHSTDQGALMYPTYSNTDPKTFQLPQDDINAIQYLYGKSSNPVQPTGPSTPSRCDPNVVFNAVTTMRGELIFFVKRFLWRKHPQASEAELMFVQAFWPSLPTNIDAAYENPITEQILVFKGSKYTALDGFDVVQGYPRNIYSLGFPKTVKRIDAAVHIEQLGKTYFFAAKKYWSYDEDKKQMDKGFPKQISNDFPGIPDKIDAAFYYRGRLYFFIGRSQFEYNINSKRIVQVLRSNSWLGC

SEQ ID NO: 108 - protein, 368 aa, Xenopus laevis
  MMP-18 mature
YSTVAKSSAWQKKDLTYRILNFTPDLPQADVETAIQRAFKVWSDVTPLTFTRIYNEVSDIEISFTAGDHKDNSPFDGSGGILAHAFQPGNGIGGDAHFDEDETWTKTSEIYNLFLVAAHEFGHSLGLSHSTDQGALMYPTYSNTDPKTFQLPQDDINAIQYLYGKSSNPVQPTGPSTPSRCDPNVVFNAVTTMRGELIFFVKRFLWRKHPQASEAELMFVQAFWPSLPTNIDAAYENPITEQILVFKGSKYTALDGFDVVQGYPRNIYSLGFPKTVKRIDAAVHIEQLGKTYFFAAKKYWSYDEDKKQMDKGFPKQISNDFPGIPDKIDAAFYYRGRLYFFIGRSQFEYNINSKRIVQVLRSNSWLGC

SEQ ID NO: 109 - DNA, 3546 bp, Homo sapiens
  MMP-2
gcggctgccctcccttgtttccgctgcatccagacttcctcaggcggtggctggaggctgcgcatctggggctttaaacatacaaagggattgccaggacctgcggcggcggcggcggcggcgggggctggggcgcgggggccggaccatgagccgctgagccgggcaaaccccaggccaccgagccagcggaccctcggagcgcagccctgcgccgcggagcaggctccaaccaggcggcgaggcggccacacgcaccgagccagcgacccccgggcgacgcgcggggccagggagcgctacgatggaggcgctaatggcccggggcgcgctcacgggtcccctgagggcgctctgtctcctgggctgcctgctgagccacgccgccgccgcgccgtcgcccatcatcaagttccccggcgatgtcgcccccaaaacggacaaagagttggcagtgcaatacctgaacaccttctatggctgccccaaggagagctgcaacctgtttgtgctgaaggacacactaaagaagatgcagaagttctttggactgccccagacaggtgatcttgaccagaataccatcgagaccatgcggaagccacgctgcggcaacccagatgtggccaactacaacttcttccctcgcaagcccaagtgggacaagaaccagatcacatacaggatcattggctacacacctgatctggacccagagacagtggatgatgcctttgctcgtgccttccaagtctggagcgatgtgaccccactgcggttttctcgaatccatgatggagaggcagacatcatgatcaactttggccgctgggagcatggcgatggatacccctttgacggtaaggacggactcctggctcatgccttcgccccaggcactggtgttgggggagactcccattttgatgacgatgagctatggaccttgggagaaggccaagtggtccgtgtgaagtatgggaacgccgatggggagtactgcaagttccccttcttgttcaatggcaaggagtacaacagctgcactgataccggccgcagcgatggcttcctctggtgctccaccacctacaactttgagaaggatggcaagtacggcttctgtccccatgaagccctgttcaccatgggcggcaacgctgaaggacagccctgcaagtttccattccgcttccagggcacatcctatgacagctgcaccactgagggccgcacggatggctaccgctggtgcggcaccactgaggactacgaccgcgacaagaagtatggcttctgccctgagaccgccatgtccactgttggtgggaactcagaaggtgccccctgtgtcttccccttcactttcctgggcaacaaatatgagagctgcaccagcgccggccgcagtgacggaaagatgtggtgtgcgaccacagccaactacgatgatgaccgcaagtggggcttctgccctgaccaagggtacagcctgttcctcgtggcagcccacgagtttggccacgccatggggctggagcactcccaagaccctggggccctgatggcacccatttacacctacaccaagaacttccgtctgtcccaggatgacatcaagggcattcaggagctctatggggcctctcctgacattgaccttggcaccggccccacccccacgctgggccctgtcactcctgagatctgcaaacaggacattgtatttgatggcatcgctcagatccgtggtgagatcttcttcttcaaggaccggttcatttggcggactgtgacgccacgtgacaagcccatggggcccctgctggtggccacattctggcctgagctcccggaaaagattgatgcggtatacgaggccccacaggaggagaaggctgtgttctttgcagggaatgaatactggatctactcagccagcaccctggagcgagggtaccccaagccactgaccagcctgggactgccccctgatgtccagcgagtggatgccgcctttaactggagcaaaaacaagaagacatacatctttgctggagacaaattctggagatacaatgaggtgaagaagaaaatggatcctggcttccccaagctcatcgcagatgcctggaatgccatccccgataacctggatgccgtcgtggacctgcagggcggcggtcacagctacttcttcaagggtgcctattacctgaagctggagaaccaaagtctgaagagcgtgaagtttggaagcatcaaatccgactggctaggctgctgagctggccctggctcccacaggcccttcctctccactgccttcgatacaccgggcctggagaactagagaaggacccggaggggcctggcagccgtgccttcagctctacagctaatcagcattctcactcctacctggtaatttaagattccagagagtggctcctcccggtgcccaagaatagatgctgactgtactcctcccaggcgccccttccccctccaatcccaccaaccctcagagccacccctaaagagatactttgatattttcaacgcagccctgctttgggctgccctggtgctgccacacttcaggctcttctcctttcacaaccttctgtggctcacagaacccttggagccaatggagactgtctcaagagggcactggtggcccgacagcctggcacagggcagtgggacagggcatggccaggtggccactccagacccctggcttttcactgctggctgccttagaacctttcttacattagcagtttgctttgtatgcactttgtttttttctttgggtcttgttttttttttccacttagaaattgcatttcctgacagaaggactcaggttgtctgaagtcactgcacagtgcatctcagcccacatagtgatggttcccctgttcactctacttagcatgtccctaccgagtctcttctccactggatggaggaaaaccaagccgtggcttcccgctcagccctccctgcccctcccttcaaccattccccatgggaaatgtcaacaagtatgaataaagacacctactgagtggccgtgtttgccatctgttttagcagagcctagacaagggccacagacccagccagaagcggaaacttaaaaagtccgaatctctgctccctgcagggcacaggtgatggtgtctgctggaaaggtcagagcttccaaagtaaacagcaagagaacctcagggagagtaagctctagtccctctgtcctgtagaaagagccctgaagaatcagcaattttgttgctttattgtggcatctgttcgaggtttgcttcctctttaagtctgtttcttcattagcaatcatatcagttttaatgctactactaacaatgaacagtaacaataatatccccctcaattaatagagtgctttctatgtgcaaggcacttttcacgtgtcacctattttaacctttccaaccacataaataaaaaaggccattattagttgaatcttattgatgaagagaaaaaaaaaaa

SEQ ID NO: 110 - protein, 660 aa, Homo sapiens
  MMP-2 precursor
MEALMARGALTGPLRALCLLGCLLSHAAAAPSPIIKFPGDVAPKTDKELAVQYLNTFYGCPKESCNLFVLKDTLKKMQKFFGLPQTGDLDQNTIETMRKPRCGNPDVANYNFFPRKPKWDKNQITYRIIGYTPDLDPETVDDAFARAFQVWSDVTPLRFSRIHDGEADIMINFGRWEHGDGYPFDGKDGLLAHAFAPGTGVGGDSHFDDDELWTLGEGQVVRVKYGNADGEYCKFPFLFNGKEYNSCTDTGRSDGFLWCSTTYNFEKDGKYGFCPHEALFTMGGNAEGQPCKFPFRFQGTSYDSCTTEGRTDGYRWCGTTEDYDRDKKYGFCPETAMSTVGGNSEGAPCVFPFTFLGNKYESCTSAGRSDGKMWCATTANYDDDRKWGFCPDQGYSLFLVAAHEFGHAMGLEHSQDPGALMAPIYTYTKNFRLSQDDIKGIQELYGASPDIDLGTGPTPTLGPVTPEICKQDIVFDGIAQIRGEIFFFKDRFIWRTVTPRDKPMGPLLVATFWPELPEKIDAVYEAPQEEKAVFFAGNEYWIYSASTLERGYPKPLTSLGLPPDVQRVDAAFNWSKNKKTYIFAGDKFWRYNEVKKKMDPGFPKLIADAWNAIPDNLDAVVDLQGGGHSYFFKGAYYLKLENQSLKSVKFGSIKSDWLGC

SEQ ID NO: 111 - protein, 551 aa, Homo sapiens
  MMP-2 mature
YNFFPRKPKWDKNQITYRIIGYTPDLDPETVDDAFARAFQVWSDVTPLRFSRIHDGEADIMINFGRWEHGDGYPFDGKDGLLAHAFAPGTGVGGDSHFDDDELWTLGEGQVVRVKYGNADGEYCKFPFLFNGKEYNSCTDTGRSDGFLWCSTTYNFEKDGKYGFCPHEALFTMGGNAEGQPCKFPFRFQGTSYDSCTTEGRTDGYRWCGTTEDYDRDKKYGFCPETAMSTVGGNSEGAPCVFPFTFLGNKYESCTSAGRSDGKMWCATTANYDDDRKWGFCPDQGYSLFLVAAHEFGHAMGLEHSQDPGALMAPIYTYTKNFRLSQDDIKGIQELYGASPDIDLGTGPTPTLGPVTPEICKQDIVFDGIAQIRGEIFFFKDRFIWRTVTPRDKPMGPLLVATFWPELPEKIDAVYEAPQEEKAVFFAGNEYWIYSASTLERGYPKPLTSLGLPPDVQRVDAAFNWSKNKKTYIFAGDKFWRYNEVKKKMDPGFPKLIADAWNAIPDNLDAVVDLQGGGHSYFFKGAYYLKLENQSLKSVKFGSIKSDWLGC

SEQ ID NO: 112 - DNA, 2387 bp, Homo sapiens
  MMP-9
agacacctctgccctcaccatgagcctctggcagcccctggtcctggtgctcctggtgctgggctgctgctttgctgcccccagacagcgccagtccacccttgtgctcttccctggagacctgagaaccaatctcaccgacaggcagctggcagaggaatacctgtaccgctatggttacactcgggtggcagagatgcgtggagagtcgaaatctctggggcctgcgctgctgcttctccagaagcaactgtccctgcccgagaccggtgagctggatagcgccacgctgaaggccatgcgaaccccacggtgcggggtcccagacctgggcagattccaaacctttgagggcgacctcaagtggcaccaccacaacatcacctattggatccaaaactactcggaagacttgccgcgggcggtgattgacgacgcctttgcccgcgccttcgcactgtggagcgcggtgacgccgctcaccttcactcgcgtgtacagccgggacgcagacatcgtcatccagtttggtgtcgcggagcacggagacgggtatcccttcgacgggaaggacgggctcctggcacacgcctttcctcctggccccggcattcagggagacgcccatttcgacgatgacgagttgtggtccctgggcaagggcgtcgtggttccaactcggtttggaaacgcagatggcgcggcctgccacttccccttcatcttcgagggccgctcctactctgcctgcaccaccgacggtcgctccgacggcttgccctggtgcagtaccacggccaactacgacaccgacgaccggtttggcttctgccccagcgagagactctacacccaggacggcaatgctgatgggaaaccctgccagtttccattcatcttccaaggccaatcctactccgcctgcaccacggacggtcgctccgacggctaccgctggtgcgccaccaccgccaactacgaccgggacaagctcttcggcttctgcccgacccgagctgactcgacggtgatggggggcaactcggcgggggagctgtgcgtcttccccttcactttcctgggtaaggagtactcgacctgtaccagcgagggccgcggagatgggcgcctctggtgcgctaccacctcgaactttgacagcgacaagaagtggggcttctgcccggaccaaggatacagtttgttcctcgtggcggcgcatgagttcggccacgcgctgggcttagatcattcctcagtgccggaggcgctcatgtaccctatgtaccgcttcactgaggggccccccttgcataaggacgacgtgaatggcatccggcacctctatggtcctcgccctgaacctgagccacggcctccaaccaccaccacaccgcagcccacggctcccccgacggtctgccccaccggaccccccactgtccacccctcagagcgccccacagctggccccacaggtcccccctcagctggccccacaggtccccccactgctggcccttctacggccactactgtgcctttgagtccggtggacgatgcctgcaacgtgaacatcttcgacgccatcgcggagattgggaaccagctgtatttgttcaaggatgggaagtactggcgattctctgagggcagggggagccggccgcagggccccttccttatcgccgacaagtggcccgcgctgccccgcaagctggactcggtctttgaggagcggctctccaagaagcttttcttcttctctgggcgccaggtgtgggtgtacacaggcgcgtcggtgctgggcccgaggcgtctggacaagctgggcctgggagccgacgtggcccaggtgaccggggccctccggagtggcagggggaagatgctgctgttcagcgggcggcgcctctggaggttcgacgtgaaggcgcagatggtggatccccggagcgccagcgaggtggaccggatgttccccggggtgcctttggacacgcacgacgtcttccagtaccgagagaaagcctatttctgccaggaccgcttctactggcgcgtgagttcccggagtgagttgaaccaggtggaccaagtgggctacgtgacctatgacatcctgcagtgccctgaggactagggctcccgtcctgctttggcagtgccatgtaaatccccactgggaccaaccctggggaaggagccagtttgccggatacaaactggtattctgttctggaggaaagggaggagtggaggtgggctgggccctctcttctcacctttgttttttgttggagtgtttctaataaacttggattctctaacctttaaaaaaaaaaaaaaaaaaaaaaaaaaaaaaaaaaaaaaaaaaaaaaaaaaaa

SEQ ID NO: 113 - protein, 707 aa, Homo sapiens
  MMP-9 precursor
MSLWQPLVLVLLVLGCCFAAPRQRQSTLVLFPGDLRTNLTDRQLAEEYLYRYGYTRVAEMRGESKSLGPALLLLQKQLSLPETGELDSATLKAMRTPRCGVPDLGRFQTFEGDLKWHHHNITYWIQNYSEDLPRAVIDDAFARAFALWSAVTPLTFTRVYSRDADIVIQFGVAEHGDGYPFDGKDGLLAHAFPPGPGIQGDAHFDDDELWSLGKGVVVPTRFGNADGAACHFPFIFEGRSYSACTTDGRSDGLPWCSTTANYDTDDRFGFCPSERLYTQDGNADGKPCQFPFIFQGQSYSACTTDGRSDGYRWCATTANYDRDKLFGFCPTRADSTVMGGNSAGELCVFPFTFLGKEYSTCTSEGRGDGRLWCATTSNFDSDKKWGFCPDQGYSLFLVAAHEFGHALGLDHSSVPEALMYPMYRFTEGPPLHKDDVNGIRHLYGPRPEPEPRPPTTTTPQPTAPPTVCPTGPPTVHPSERPTAGPTGPPSAGPTGPPTAGPSTATTVPLSPVDDACNVNIFDAIAEIGNQLYLFKDGKYWRFSEGRGSRPQGPFLIADKWPALPRKLDSVFEERLSKKLFFFSGRQVWVYTGASVLGPRRLDKLGLGADVAQVTGALRSGRGKMLLFSGRRLWRFDVKAQMVDPRSASEVDRMFPGVPLDTHDVFQYREKAYFCQDRFYWRVSSRSELNQVDQVGYVTYDILQCPED

SEQ ID NO: 114 - protein, 614 aa, Homo sapiens
  MMP-9 mature
MRTPRCGVPDLGRFQTFEGDLKWHHHNITYWIQNYSEDLPRAVIDDAFARAFALWSAVTPLTFTRVYSRDADIVIQFGVAEHGDGYPFDGKDGLLAHAFPPGPGIQGDAHFDDDELWSLGKGVVVPTRFGNADGAACHFPFIFEGRSYSACTTDGRSDGLPWCSTTANYDTDDRFGFCPSERLYTRDGNADGKPCQFPFIFQGQSYSACTTDGRSDGYRWCATTANYDRDKLFGFCPTRADSTVMGGNSAGELCVFPFTFLGKEYSTCTSEGRGDGRLWCATTSNFDSDKKWGFCPDQGYSLFLVAAHEFGHALGLDHSSVPEALMYPMYRFTEGPPLHKDDVNGIRHLYGPRPEPEPRPPTTTTPQPTAPPTVCPTGPPTVHPSERPTAGPTGPPSAGPTGPPTAGPSTATTVPLSPVDDACNVNIFDAIAEIGNQLYLFKDGKYWRFSEGRGSRPQGPFLIADKWPALPRKLDSVFEEPLSKKLFFFSGRQVWVYTGASVLGPRRLDKLGLGADVAQVTGALRSGRGKMLLFSGRRLWRFDVKAQMVDPRSASEVDRMFPGVPLDTHDVFQYREKAYFCQDRFYWRVSSRSELNQVDQVGYVTYDILQCPED

SEQ ID NO: 115 - DNA, 1828 bp, Homo sapiens
  MMP-3
ctacaaggaggcaggcaagacagcaaggcatagagacaacatagagctaagtaaagccagtggaaatgaagagtcttccaatcctactgttgctgtgcgtggcagtttgctcagcctatccattggatggagctgcaaggggtgaggacaccagcatgaaccttgttcagaaatatctagaaaactactacgacctcaaaaaagatgtgaaacagtttgttaggagaaaggacagtggtcctgttgttaaaaaaatccgagaaatgcagaagttccttggattggaggtgacggggaagctggactccgacactctggaggtgatgcgcaagcccaggtgtggagttcctgatgttggtcacttcagaacctttcctggcatcccgaagtggaggaaaacccaccttacatacaggattgtgaattatacaccagatttgccaaaagatgctgttgattctgctgttgagaaagctctgaaagtctgggaagaggtgactccactcacattctccaggctgtatgaaggagaggctgatataatgatctcttttgcagttagagaacatggagacttttacccttttgatggacctggaaatgttttggcccatgcctatgcccctgggccagggattaatggagatgcccactttgatgatgatgaacaatggacaaaggatacaacagggaccaatttatttctcgttgctgctcatgaaattggccactccctgggtctctttcactcagccaacactgaagctttgatgtacccactctatcactcactcacagacctgactcggttccgcctgtctcaagatgatataaatggcattcagtccctctatggacctccccctgactcccctgagacccccctggtacccacggaacctgtccctccagaacctgggacgccagccaactgtgatcctgctttgtcctttgatgctgtcagcactctgaggggagaaatcctgatctttaaagacaggcacttttggcgcaaatccctcaggaagcttgaacctgaattgcatttgatctcttcattttggccatctcttccttcaggcgtggatgccgcatatgaagttactagcaaggacctcgttttcatttttaaaggaaatcaattctgggctatcagaggaaatgaggtacgagctggatacccaagaggcatccacaccctaggtttccctccaaccgtgaggaaaatcgatgcagccatttctgataaggaaaagaacaaaacatatttctttgtagaggacaaatactggagatttgatgagaagagaaattccatggagccaggctttcccaagcaaatagctgaagactttccagggattgactcaaagattgatgctgtttttgaagaatttgggttcttttatttctttactggatcttcacagttggagtttgacccaaatgcaaagaaagtgacacacactttgaagagtaacagctggcttaattgttgaaagagatatgtagaaggcacaatatgggcactttaaatgaagctaataattcttcacctaagtctctgtgaattgaaatgttcgttttctcctgcctgtgctgtgactcgagtcacactcaagggaacttgagcgtgaatctgtatcttgccggtcatttttatgttattacagggcattcaaatgggctgctgcttagcttgcaccttgtcacatagagtgatctttcccaagagaaggggaagcactcgtgtgcaacagacaagtgactgtatctgtgtagactatttgcttatttaataaagacgatttgtcagttattttatctt

SEQ ID NO: 116 - protein, 477 aa, Homo sapiens
  MMP-3 precursor
MKSLPILLLLCVAVCSAYPLDGAARGEDTSMNLVQKYLENYYDLKKDVKQFVRRKDSGPVVKKIREMQKFLGLEVTGKLDSDTLEVMRKPRCGVPDVGHFRTFPGIPKWRKTHLTYRIVNYTPDLPKDAVDSAVEKALKVWEEVTPLTFSRLYEGEADIMISFAVREHGDFYPFDGPGNVLAHAYAPGPGINGDAHFDDDEQWTKDTTGTNLFLVAAHEIGHSLGLFHSANTEALMYPLYHSLTDLTRFRLSQDDINGIQSLYGPPPDSPETPLVPTEPVPPEPGTPANCDPALSFDAVSTLRGEILIFKDRHFWRKSLRKLEPELHLISSFWPSLPSGVDAAYEVTSKDLVFIFKGNQFWAIRGNEVRAGYPRGIHTLGFPPTVRKIDAAISDKEKNKTYFFVEDKYWRFDEKRNSMEPGFPKQIAEDFPGIDSKIDAVFEEFGFFYFFTGSSQLEFDPNAKKVTHTLKSNSWLNC

SEQ ID NO: 117 - protein, 378 aa, Homo sapiens
  MMP-3 mature
FRTFPGIPKWRKTHLTYRIVNYTPDLPKDAVDSAVEKALKVWEEVTPLTFSRLYEGEADIMISFAVREHGDFYPFDGPGNVLAHAYAPGPGINGDAHFDDDEQWTKDTTGTNLFLVAAHEIGHSLGLFHSANTEALMYPLYHSLTDLTRFRLSQDDINGIQSLYGPPPDSPETPLVPTEPVPPEPGTPANCDPALSFDAVSTLRGEILIFKDRHFWRKSLRKLEPELHLISSFWPSLPSGVDAAYEVTSKDLVFIFKGNQFWAIRGNEVRAGYPRGIHTLGFPPTVRKIDAAISDKEKNKTYFFVEDKYWRFDEKRNSMEPGFPKQIAEDFPGIDSKIDAVFEEFGFFYFFTGSSQLEFDPNAKKVTHTLKSNSWLNC

SEQ ID NO: 118 - DNA, 1743 bp, Homo sapiens
  MMP-10
aaagaaggtaagggcagtgagaatgatgcatcttgcattccttgtgctgttgtgtctgccagtctgctctgcctatcctctgagtggggcagcaaaagaggaggactccaacaaggatcttgcccagcaatacctagaaaagtactacaacctcgaaaaggatgtgaaacagtttagaagaaaggacagtaatctcattgttaaaaaaatccaaggaatgcagaagttccttgggttggaggtgacagggaagctagacactgacactctggaggtgatgcgcaagcccaggtgtggagttcctgacgttggtcacttcagctcctttcctggcatgccgaagtggaggaaaacccaccttacatacaggattgtgaattatacaccagatttgccaagagatgctgttgattctgccattgagaaagctctgaaagtctgggaagaggtgactccactcacattctccaggctgtatgaaggagaggctgatataatgatctctttcgcagttaaagaacatggagacttttactcttttgatggcccaggacacagtttggctcatgcctacccacctggacctgggctttatggagatattcactttgatgatgatgaaaaatggacagaagatgcatcaggcaccaatttattcctcgttgctgctcatgaacttggccactccctggggctctttcactcagccaacactgaagctttgatgtacccactctacaactcattcacagagctcgcccagttccgcctttcgcaagatgatgtgaatggcattcagtctctctacggacctccccctgcctctactgaggaacccctggtgcccacaaaatctgttccttcgggatctgagatgccagccaagtgtgatcctgctttgtccttcgatgccatcagcactctgaggggagaatatctgttctttaaagacagatatttttggcgaagatcccactggaaccctgaacctgaatttcatttgatttctgcattttggccctctcttccatcatatttggatgctgcatatgaagttaacagcagggacaccgtttttatttttaaaggaaatgagttctgggccatcagaggaaatgaggtacaagcaggttatccaagaggcatccataccctgggttttcctccaaccataaggaaaattgatgcagctgtttctgacaaggaaaagaagaaaacatacttctttgcagcggacaaatactggagatttgatgaaaatagccagtccatggagcaaggcttccctagactaatagctgatgactttccaggagttgagcctaaggttgatgctgtattacaggcatttggatttttctacttcttcagtggatcatcacagtttgagtttgaccccaatgccaggatggtgacacacatattaaagagtaacagctggttacattgctaggcgagatagggggaagacagatatgggtgtttttaataaatctaataattattcatctaatgtattatgagccaaaatggttaatttttcctgcatgttctgtgactgaagaagatgagccttgcagatatctgcatgtgtcatgaagaatgtttctggaattcttcacttgcttttgaattgcactgaacagaattaagaaatactcatgtgcaataggtgagagaatgtattttcatagatgtgttattacttcctcaataaaaagttttattttgggcctgttcctt

SEQ ID NO: 119 - protein, 476 aa, Homo sapiens
  MMP-10 precursor
MMHLAFLVLLCLPVCSAYPLSGAAKEEDSNKDLAQQYLEKYYNLEKDVKQFRRKDSNLIVKKIQGMQKFLGLEVTGKLDTDTLEVMRKPRCGVPDVGHFSSFPGMPKWRKTHLTYRIVNYTPDLPRDAVDSAIEKALKVWEEVTPLTFSRLYEGEADIMISFAVKEHGDFYSFDGPGHSLAHAYPPGPGLYGDIHFDDDEKWTEDASGTNLFLVAAHELGHSLGLFHSANTEALMYPLYNSFTELAQFRLSQDDVNGIQSLYGPPPASTEEPLVPTKSVPSGSEMPAKCDPALSFDAISTLRGEYLFFKDRYFWRRSHWNPEPEFHLISAFWPSLPSYLDAAYEVNSRDTVFIFKGNEFWAIRGNEVQAGYPRGIHTLGFPPTIRKIDAAVSDKEKKKTYFFAADKYWRFDENSQSMEQGFPRLIADDFPGVEPKVDAVLQAFGFFYFFSGSSQFEFDPNARMVTHILKSNSWLHC

SEQ ID NO: 120 - protein, 378 aa, Homo sapiens
  MMP-10 mature
FSSFPGMPKWRKTHLTYRIVNYTPDLPRDAVDSAIEKALKVWEEVTPLTFSRLYEGEADIMISFAVKEHGDFYSFDGPGHSLAHAYPPGPGLYGDIHFDDDEKWTEDASGTNLFLVAAHELGHSLGLFHSANTEALMYPLYNSFTELAQFRLSQDDVNGIQSLYGPPPASTEEPLVPTKSVPSGSEMPAKCDPALSFDAISTLRGEYLFFKDRYFWRRSHWNPEPEFHLISAFWPSLPSYLDAAYEVNSRDTVFIFKGNEFWAIRGNEVQAGYPRGIHTLGFPPTIRKIDAAVSDKEKKKTYFFAADKYWRFDENSQSMEQGFPRLIADDFPGVEPKVDAVLQAFGFFYFFSGSSQFEFDPNARMVTHILKSNSWLHC

SEQ ID NO: 121 - DNA, 2247 bp, Homo sapiens
  MMP-11
ccggggcggatggctccggccgcctggctccgcagcgcggccgcgcgcgccctcctgcccccgatgctgctgctgctgctccagccgccgccgctgctggcccgggctctgccgccggacgtccaccacctccatgccgagaggagggggccacagccctggcatgcagccctgcccagtagcccggcacctgcccctgccacgcaggaagccccccggcctgccagcagcctcaggcctccccgctgtggcgtgcccgacccatctgatgggctgagtgcccgcaaccgacagaagaggttcgtgctttctggcgggcgctgggagaagacggacctcacctacaggatccttcggttcccatggcagttggtgcaggagcaggtgcggcagacgatggcagaggccctaaaggtatggagcgatgtgacgccactcacctttactgaggtgcacgagggccgtgctgacatcatgatcgacttcgccaggtactggcatggggacgacctgccgtttgatgggcctgggggcatcctggcccatgccttcttccccaagactcaccgagaaggggatgtccacttcgactatgatgagacctggactatcggggatgaccagggcacagacctgctgcaggtggcagcccatgaatttggccacgtgctggggctgcagcacacaacagcagccaaggccctgatgtccgccttctacacctttcgctacccactgagtctcagcccagatgactgcaggggcgttcaacacctatatggccagccctggcccactgtcacctccaggaccccagccctgggcccccaggctgggatagacaccaatgagattgcaccgctggagccagacgccccgccagatgcctgtgaggcctcctttgacgcggtctccaccatccgaggcgagctctttttcttcaaagcgggctttgtgtggcgcctccgtgggggccagctgcagcccggctacccagcattggcctctcgccactggcagggactgcccagccctgtggacgctgccttcgaggatgcccagggccacatttggttcttccaaggtgctcagtactgggtgtacgacggtgaaaagccagtcctgggccccgcacccctcaccgagctgggcctggtgaggttcccggtccatgctgccttggtctggggtcccgagaagaacaagatctacttcttccgaggcagggactactggcgtttccaccccagcacccggcgtgtagacagtcccgtgccccgcagggccactgactggagaggggtgccctctgagatcgacgctgccttccaggatgctgatggctatgcctacttcctgcgcggccgcctctactggaagtttgaccctgtgaaggtgaaggctctggaaggcttcccccgtctcgtgggtcctgacttctttggctgtgccgagcctgccaacactttcctctgaccatggcttggatgccctcaggggtgctgacccctgccaggccacgaatatcaggctagagacccatggccatctttgtggctgtgggcaccaggcatgggactgagcccatgtctcctgcagggggatggggtggggtacaaccaccatgacaactgccgggagggccacgcaggtcgtggtcacctgccagcgactgtctcagactgggcagggaggctttggcatgacttaagaggaagggcagtcttgggacccgctatgcaggtcctggcaaacctggctgccctgtctcatccctgtccctcagggtagcaccatggcaggactgggggaactggagtgtccttgctgtatccctgttgtgaggttccttccaggggctggcactgaagcaagggtgctggggccccatggccttcagccctggctgagcaactgggctgtagggcagggccacttcctgaggtcaggtcttggtaggtgcctgcatctgtctgccttctggctgacaatcctggaaatctgttctccagaatccaggccaaaaagttcacagtcaaatggggaggggtattcttcatgcaggagaccccaggccctggaggctgcaacatacctcaatcctgtcccaggccggatcctcctgaagcccttttcgcagcactgctatcctccaaagccattgtaaatgtgtgtacagtgtgtataaaccttcttcttcttttttttttttaaactgaggattgtcattaaacacagttgttttct

SEQ ID NO: 122 - protein, 488 aa, Homo sapiens
  MMP-11 precursor
MAPAAWLRSAAARALLPPMLLLLLQPPPLLARALPPDVHHLHAERRGPQPWHAALPSSPAPAPATQEAPRPASSLRPPRCGVPDPSDGLSARNRQKRFVLSGGRWEKTDLTYRILRFPWQLVQEQVRQTMAEALKVWSDVTPLTFTEVHEGRADIMIDFARYWHGDDLPFDGPGGILAHAFFPKTHREGDVHFDYDETWTIGDDQGTDLLQVAAHEFGHVLGLQHTTAAKALMSAFYTFRYPLSLSPDDCRGVQHLYGQPWPTVTSRTPALGPQAGIDTNEIAPLEPDAPPDACEASFDAVSTIRGELFFFKAGFVWRLRGGQLQPGYPALASRHWQGLPSPVDAAFEDAQGHIWFFQGAQYWVYDGEKPVLGPAPLTELGLVRFPVHAALVWGPEKNKIYFFRGRDYWRFHPSTRRVDSPVPRRATDWRGVPSEIDAAFQDADGYAYFLRGRLYWKFDPVKVKALEGFPRLVGPDFFGCAEPANTFL

SEQ ID NO: 123 - protein, 391 aa, Homo sapiens
  MMP-11 mature
FVLSGGRWEKTDLTYRILRFPWQLVQEQVRQTMAEALKVWSDVTPLTFTEVHEGRADIMIDFARYWHGDDLPFDGPGGILAHAFFPKTHREGDVHFDYDETWTIGDDQGTDLLQVAAHEFGHVLGLQHTTAAKALMSAFYTFRYPLSLSPDDCRGVQHLYGQPWPTVTSRTPALGPQAGIDTNEIAPLEPDAPPDACEASFDAVSTIRGELFFFKAGFVWRLRGGQLQPGYPALASRHWQGLPSPVDAAFEDAQGHIWFFQGAQYWVYDGEKPVLGPAPLTELGLVRFPVHAALVWGPEKNKIYFFRGRDYWRFHPSTRRVDSPVPRRATDWRGVPSEIDAAFQDADGYAYFLRGRLYWKFDPVKVKALEGFPRLVGPDFFGCAEPANTFL

SEQ ID NO: 124 - DNA, 1147 bp, Homo sapiens
  MMP-7
accaaatcaaccataggtccaagaacaattgtctctggacggcagctatgcgactcaccgtgctgtgtgctgtgtgcctgctgcctggcagcctggccctgccgctgcctcaggaggcgggaggcatgagtgagctacagtgggaacaggctcaggactatctcaagagattttatctctatgactcagaaacaaaaaatgccaacagtttagaagccaaactcaaggagatgcaaaaattctttggcctacctataactggaatgttaaactcccgcgtcatagaaataatgcagaagcccagatgtggagtgccagatgttgcagaatactcactatttccaaatagcccaaaatggacttccaaagtggtcacctacaggatcgtatcatatactcgagacttaccgcatattacagtggatcgattagtgtcaaaggctttaaacatgtggggcaaagagatccccctgcatttcaggaaagttgtatggggaactgctgacatcatgattggctttgcgcgaggagctcatggggactcctacccatttgatgggccaggaaacacgctggctcatgcctttgcgcctgggacaggtctcggaggagatgctcacttcgatgaggatgaacgctggacggatggtagcagtctagggattaacttcctgtatgctgcaactcatgaacttggccattctttgggtatgggacattcctctgatcctaatgcagtgatgtatccaacctatggaaatggagatccccaaaattttaaactttcccaggatgatattaaaggcattcagaaactatatggaaagagaagtaattcaagaaagaaatagaaacttcaggcagaacatccattcattcattcattggattgtatatcattgttgcacaatcagaattgataagcactgttcctccactccatttagcaattatgtcacccttttttattgcagttggtttttgaatgtctttcactccttttaaggataaactcctttatggtgtgactgtgtcttattcatctatacttgcagtgggtagatgtcaataaatgttacatacacaaataaataaaatgtttattccatggtaaatttaaaaaaaaaaaaaaaaaaaaaaaaaaaaa

SEQ ID NO: 125 - protein, 267 aa, Homo sapiens
  MMP-7 precursor
MRLTVLCAVCLLPGSLALPLPQEAGGMSELQWEQAQDYLKRFYLYDSETKNANSLEAKLKEMQKFFGLPITGMLNSRVIEIMQKPRCGVPDVAEYSLFPNSPKWTSKVVTYRIVSYTRDLPHITVDRLVSKALNMWGKEIPLHFRKVVWGTADIMIGFARGAHGDSYPFDGPGNTLAHAFAPGTGLGGDAHFDEDERWTDGSSLGINFLYAATHELGHSLGMGHSSDPNAVMYPTYGNGDPQNFKLSQDDIKGIQKLYGKRSNSRKK

SEQ ID NO: 126 - protein, 173 aa, Homo sapiens
  MMP-7 mature
YSLFPNSPKWTSKVVTYRIVSYTRDLPHITVDRLVSKALNMWGKEIPLHFRKVVWGTADIMIGFARGAHGDSYPFDGPGNTLAHAFAPGTGLGGDAHFDEDERWTDGSSLGINFLYAATHELGHSLGMGHSSDPNAVMYPTYGNGDPQNFKLSQDDIKGIQKLYGKRSNSRKK

SEQ ID NO: 127 - DNA, 998 bp, Homo sapiens
  MMP-26
gacaaatgagggtttggcatgcagctcgtcatcttaagagttactatcttcttgccctggtgtttcgccgttccagtgccccctgctgcagaccataaaggatgggactttgttgagggctatttccatcaatttttcctgaccaagaaggagtcgccactccttacccaggagacacaaacacagctcctgcaacaattccatcggaatgggacagacctacttgacatgcagatgcatgctctgctacaccagccccactgtggggtgcctgatgggtccgacacctccatctcgccaggaagatgcaagtggaataagcacactctaacttacaggattatcaattacccacatgatatgaagccatccgcagtgaaagacagtatatataatgcagtttccatctggagcaatgtgacccctttgatattccagcaagtgcagaatggagatgcagacatcaaggtttctttctggcagtgggcccatgaagatggttggccctttgatgggccaggtggtatcttaggccatgcctttttaccaaattctggaaatcctggagttgtccattttgacaagaatgaacactggtcagcttcagacactggatataatctgttcctggttgcaactcatgagattgggcattctttgggcctgcagcactctgggaatcagagctccataatgtaccccacttactggtatcacgaccctagaaccttccagctcagtgccgatgatatccaaaggatccagcatttgtatggagaaaaatgttcatctgacataccttaatgttagcacagaggacttattcaacctgtcctttcagggagtttattggaggatcaaagaactgaaagcactagagcagccttggggactgctaggatgaagccctaaagaatgcaacctagtcaggttagctgaaccgacactcaaaacgctactgagtcacaataaagattgttttaaagagtaaaaaaaaa

SEQ ID NO: 128 - protein, 261 aa, Homo sapiens
  MMP-26 precursor
MQLVILRVTIFLPWCFAVPVPPAADHKGWDFVEGYFHQFFLTKKESPLLTQETQTQLLQQFHRNGTDLLDMQMHALLHQPHCGVPDGSDTSISPGRCKWNKHTLTYRIINYPHDMKPSAVKDSIYNAVSIWSNVTPLIFQQVQNGDADIKVSFWQWAHEDGWPFDGPGGILGHAFLPNSGNPGVVHFDKNEHWSASDTGYNLFLVATHEIGHSLGLQHSGNQSSIMYPTYWYHDPRTFQLSADDIQRIQHLYGEKCSSDIP

SEQ ID NO: 129 - protein, 172 aa, Homo sapiens
  MMP-26 mature
TSISPGRCKWNKHTLTYRIINYPHDMKPSAVKDSIYNAVSIWSNVTPLIFQQVQNGDADIKVSFWQWAHEDGWPFDGPGGILGHAFLPNSGNPGVVHFDKNEHWSASDTGYNLFLVATHEIGHSLGLQHSGNQSSIMYPTYWYHDPRTFQLSADDIQRIQHLYGEKCSSDIP

SEQ ID NO: 130 - DNA, 1825 bp, Homo sapiens
  MMP-12
agaaaggaacacagtaaactgaattgatccgtttagaagtttacaatgaagtttcttctaatactgctcctgcaggccactgcttctggagctcttcccctgaacagctctacaagcctggaaaaaaataatgtgctatttggtgaaagatacttagaaaaattttatggccttgagataaacaaacttccagtgacaaaaatgaaatatagtggaaacttaatgaaggaaaaaatccaagaaatgcagcacttcttgggtctgaaagtgaccgggcaactggacacatctaccctggagatgatgcacgcacctcgatgtggagtccccgatgtccatcatttcagggaaatgccaggggggcccgtatggaggaaacattatatcacctacagaatcaataattacacacctgacatgaaccgtgaggatgttgactacgcaatccggaaagctttccaagtatggagtaatgttacccccttgaaattcagcaagattaacacaggcatggctgacattttggtggtttttgcccgtggagctcatggagacttccatgcttttgatggcaaaggtggaatcctagcccatgcttttggacctggatctggcattggaggggatgcacatttcgatgaggacgaattctggactacacattcaggaggcaccaacttgttcctcactgctgttcacgagattggccattccttaggtcttggccattctagtgatccaaaggccgtaatgttccccacctacaaatatgttgacatcaacacatttcgcctctctgctgatgacatacgtggcattcagtccctgtatggagacccaaaagagaaccaacgcttgccaaatcctgacaattcagaaccagctctctgtgaccccaatttgagttttgatgctgtcactaccgtgggaaataagatctttttcttcaaagacaggttcttctggctgaaggtttctgagagaccaaagaccagtgttaatttaatttcttccttatggccaaccttgccatctggcattgaagctgcttatgaaattgaagccagaaatcaagtttttctttttaaagatgacaaatactggttaattagcaatttaagaccagagccaaattatcccaagagcatacattcttttggttttcctaactttgtgaaaaaaattgatgcagctgtttttaacccacgtttttataggacctacttctttgtagataaccagtattggaggtatgatgaaaggagacagatgatggaccctggttatcccaaactgattaccaagaacttccaaggaatcgggcctaaaattgatgcagtcttctactctaaaaacaaatactactatttcttccaaggatctaaccaatttgaatatgacttcctactccaacgtatcaccaaaacactgaaaagcaatagctggtttggttgttagaaatggtgtaattaatggtttttgttagttcacttcagcttaataagtatttattgcatatttgctatgtcctcagtgtaccactacttagagatatgtatcataaaaataaaatctgtaaaccataggtaatgattatataaaatacataatatttttcaattttgaaaactctaattgtccattcttgcttgactctactattaagtttgaaaatagttaccttcaaaggccaagagaattctatttgaagcatgctctgtaagttgcttcctaacatccttggactgagaaattatacttacttctggcataactaaaattaagtatatatattttggctcaaataaaattgaaaaaaaaatca

SEQ ID NO: 131 - protein, 470 aa, Homo sapiens
  MMP-12 precursor
MKFLLILLLQATASGALPLNSSTSLEKNNVLFGERYLEKFYGLEINKLPVTKMKYSGNLMKEKIQEMQHFLGLKVTGQLDTSTLEMMHAPRCGVPDVHHFREMPGGPVWRKHYITYRINNYTPDMNREDVDYAIRKAFQVWSNVTPLKFSKINTGMADILVVFARGAHGDFHAFDGKGGILAHAFGPGSGIGGDAHFDEDEFWTTHSGGTNLFLTAVHEIGHSLGLGHSSDPKAVMFPTYKYVDINTFRLSADDIRGIQSLYGDPKENQRLPNPDNSEPALCDPNLSFDAVTTVGNKIFFFKDRFFWLKVSERPKTSVNLISSLWPTLPSGIEAAYEIEARNQVFLFKDDKYWLISNLRPEPNYPKSIHSFGFPNFVKKIDAAVFNPRFYRTYFFVDNQYWRYDERRQMMDPGYPKLITKNFQGIGPKIDAVFYSKNKYYYFFQGSNQFEYDFLLQRITKTLKSNSWFGC

SEQ ID NO: 132 - protein, 365 aa, Homo sapiens
  MMP-12 mature
GPVWRKHYITYRINNYTPDMNREDVDYAIRKAFQVWSNVTPLKFSKINTGMADILVVFARGAHGDFHAFDGKGGILAHAFGPGSGIGGDAHFDEDEFWTTHSGGTNLFLTAVHEIGHSLGLGHSSDPKAVMFPTYKYVDINTFRLSADDIRGIQSLYGDPKENQRLPNPDNSEPALCDPNLSFDAVTTVGNKIFFFKDRFFWLKVSERPKTSVNLISSLWPTLPSGIEAAYEIEARNQVFLFKDDKYWLISNLRPEPNYPKSIHSFGFPNFVKKIDAAVFNPRFYRTYFFVDNQYWRYDERRQMMDPGYPKLITKNFQGIGPKIDAVFYSKNKYYYFFQGSNQFEYDFLLQRITKTLKSNSWFGC

SEQ ID NO: 133 - DNA, 3558 bp, Homo sapiens
  MMP-14
cagaccccagttcgccgactaagcagaagaaagatcaaaaaccggaaaagaggagaagagcaaacaggcactttgaggaacaatcccctttaactccaagccgacagcggtctaggaattcaagttcagtgcctaccgaagacaaaggcgccccgagggagtggcggtgcgaccccagggcgtgggcccggccgcggagcccacactgcccggctgacccggtggtctcggaccatgtctcccgccccaagacccccccgttgtctcctgctccccctgctcacgctcggcaccgcgctcgcctccctcggctcggcccaaagcagcagcttcagccccgaagcctggctacagcaatatggctacctgcctcccggggacctacgtacccacacacagcgctcaccccagtcactctcagcggccatcgctgccatgcagaagttttacggcttgcaagtaacaggcaaagctgatgcagacaccatgaaggccatgaggcgcccccgatgtggtgttccagacaagtttggggctgagatcaaggccaatgttcgaaggaagcgctacgccatccagggtctcaaatggcaacataatgaaatcactttctgcatccagaattacacccccaaggtgggcgagtatgccacatacgaggccattcgcaaggcgttccgcgtgtgggagagtgccacaccactgcgcttccgcgaggtgccctatgcctacatccgtgagggccatgagaagcaggccgacatcatgatcttctttgccgagggcttccatggcgacagcacgcccttcgatggtgagggcggcttcctggcccatgcctacttcccaggccccaacattggaggagacacccactttgactctgccgagccttggactgtcaggaatgaggatctgaatggaaatgacatcttcctggtggctgtgcacgagctgggccatgccctggggctcgagcattccagtgacccctcggccatcatggcacccttttaccagtggatggacacggagaattttgtgctgcccgatgatgaccgccggggcatccagcaactttatgggggtgagtcagggttccccaccaagatgccccctcaacccaggactacctcccggccttctgttcctgataaacccaaaaaccccacctatgggcccaacatctgtgacgggaactttgacaccgtggccatgctccgaggggagatgtttgtcttcaaggagcgctggttctggcgggtgaggaataaccaagtgatggatggatacccaatgcccattggccagttctggcggggcctgcctgcgtccatcaacactgcctacgagaggaaggatggcaaattcgtcttcttcaaaggagacaagcattgggtgtttgatgaggcgtccctggaacctggctaccccaagcacattaaggagctgggccgagggctgcctaccgacaagattgatgctgctctcttctggatgcccaatggaaagacctacttcttccgtggaaacaagtactaccgtttcaacgaagagctcagggcagtggatagcgagtaccccaagaacatcaaagtctgggaagggatccctgagtctcccagagggtcattcatgggcagcgatgaagtcttcacttacttctacaaggggaacaaatactggaaattcaacaaccagaagctgaaggtagaaccgggctaccccaagtcagccctgagggactggatgggctgcccatcgggaggccggccggatgaggggactgaggaggagacggaggtgatcatcattgaggtggacgaggagggcggcggggcggtgagcgcggctgccgtggtgctgcccgtgctgctgctgctcctggtgctggcggtgggccttgcagtcttcttcttcagacgccatgggacccccaggcgactgctctactgccagcgttccctgctggacaaggtctgacgcccaccgccggcccgcccactcctaccacaaggactttgcctctgaaggccagtggcagcaggtggtggtgggtgggctgctcccatcgtcccgagccccctccccgcagcctccttgcttctctctgtcccctggctggcctccttcaccctgaccgcctccctccctcctgccccggcattgcatcttccctagataggtcccctgagggctgagtgggagggcggccctttccagcctctgcccctcaggggaaccctgtagctttgtgtctgtccagccccatctgaatgtgttgggggctctgcacttgaaggcaggaccctcagacctcgctggtaaaggtcaaatggggtcatctgctccttttccatcccctgacataccttaacctctgaactctgacctcaggaggctctgggcactccagccctgaaagccccaggtgtacccaattggcagcctctcactactctttctggctaaaaggaatctaatcttgttgagggtagagaccctgagacagtgtgagggggtggggactgccaagccaccctaagaccttgggaggaaaactcagagagggtcttcgttgctcagtcagtcaagttcctcggagatctgcctctgcctcacctaccccagggaacttccaaggaaggagcctgagccactggggactaagtgggcagaagaaacccttggcagccctgtgcctctcgaatgttagccttggatggggctttcacagttagaagagctgaaaccaggggtgcagctgtcaggtagggtggggccggtgggagaggcccgggtcagagccctgggggtgagcctgaaggccacagagaaagaaccttgcccaaactcaggcagctggggctgaggcccaaaggcagaacagccagagggggcaggaggggaccaaaaaggaaaatgaggacgtgcagcagcattggaaggctggggccgggcaggccaggccaagccaagcagggggccacagggtgggctgtggagctctcaggaagggccctgaggaaggcacacttgctcctgttggtccctgtccttgctgcccaggcagcgtggaggggaagggtagggcagccagagaaaggagcagagaaggcacacaaacgaggaatgaggggcttcacgagaggccacagggcctggctggccacgctgtcccggcctgctcaccatctcagtgaggggcaggagctggggctcgcttaggctgggtccacgcttccctggtgccagcacccctcaagcctgtctcaccagtggcctgccctctcgctcccccacccagcccacccattgaagtctccttgggccaccaaaggtggtggccatggtaccggggacttgggagagtgagacccagtggagggagcaagaggagagggatgtcgggggggtggggcacggggtaggggaaatggggtgaacggtgctggcagttcggctagatttctgtcttgtttgtttttttgttttgtttaatgtatatttttattataattattatatatgaattccaaaaaaaaaaaaaaaaaaaaa

SEQ ID NO: 134 - protein, 582 aa, Homo sapiens
  MMP-14 precursor
MSPAPRPPRCLLLPLLTLGTALASLGSAQSSSFSPEAWLQQYGYLPPGDLRTHTQRSPQSLSAAIAAMQKFYGLQVTGKADADTMKAMRRPRCGVPDKFGAEIKANVRRKRYAIQGLKWQHNEITFCIQNYTPKVGEYATYEAIRKAFRVWESATPLRFREVPYAYIREGHEKQADIMIFFAEGFHGDSTPFDGEGGFLAHAYFPGPNIGGDTHFDSAEPWTVRNEDLNGNDIFLVAVHELGHALGLEHSSDPSAIMAPFYQWMDTENFVLPDDDRRGIQQLYGGESGFPTKMPPQPRTTSRPSVPDKPKNPTYGPNICDGNFDTVAMLRGEMFVFKERWFWRVRNNQVMDGYPMPIGQFWRGLPASINTAYERKDGKFVFFKGDKHWVFDEASLEPGYPKHIKELGRGLPTDKIDAALFWMPNGKTYFFRGNKYYRFNEELRAVDSEYPKNIKVWEGIPESPRGSFMGSDEVFTYFYKGNKYWKFNNQKLKVEPGYPKSALRDWMGCPSGGRPDEGTEEETEVIIIEVDEEGGGAVSAAAVVLPVLLLLLVLAVGLAVFFFRRHGTPRRLLYCQRSLLDKV

SEQ ID NO: 135 - protein, 471 aa, Homo sapiens
  MMP-14 mature
YAIQGLKWQHNEITFCIQNYTPKVGEYATYEAIRKAFRVWESATPLRFREVPYAYIREGHEKQADIMIFFAEGFHGDSTPFDGEGGFLAHAYFPGPNIGGDTHFDSAEPWTVRNEDLNGNDIFLVAVHELGHALGLEHSSDPSAIMAPFYQWMDTENFVLPDDDRRGIQQLYGGESGFPTKMPPQPRTTSRPSVPDKPKNPTYGPNICDGNFDTVAMLRGEMFVFKERWFWRVRNNQVMDGYPMPIGQFWRGLPASINTAYERKDGKFVFFKGDKHWVFDEASLEPGYPKHIKELGRGLPTDKIDAALFWMPNGKTYFFRGNKYYRFNEELRAVDSEYPKNIKVWEGIPESPRGSFMGSDEVFTYFYKGNKYWKFNNQKLKVEPGYPKSALRDWMGCPSGGRPDEGTEEETEVIIIEVDEEGGGAVSAAAVVLPVLLLLLVLAVGLAVFFFRRHGTPRRLLYCQRSLLDKV

SEQ ID NO: 136 - DNA, 4456 bp, Homo sapiens
  MMP-15
acgactctttgatccctcccctaagacctccttcccgtccgcctaggcctcggtatcccccaccaggtatgagaaggaggagtcttcattcttcccaggcggggagaccacgccttccctgcctcctccctccgcggggggtcgcgttggaggtcacccccgccccctaggcgctgggttgggagtgacgcggggtgggctggagaggtttcctgccgtctgggaagcgtaaacggaccgcccacctgtcgggcctcggccgcccgcacctgcttgtgagaagcctgcggctggggcaccgcccccggtccccgcccgggtccgcgcattgggagcacactggccctttaagagcgcggcggccgcggcgcgcggggaggagggctgggagcgcccggagccgcgctgaactcgccggggacgtcgggcgcccgctccttggctggctcgcttgctctctcgctcgctctctcgggtcggctccctgcgcctcctcccgggactgcttggggacccgggcccggtcgggcgcggcggcgagcagaatccccgtgcaggaggcgcgcgctccgggcagcgcccggccccgggcatggacagagggagctgggcgcgcagggagcgccgcgggaccgggcggccggagcgctgagccagacaaaggctccggagttgcgcttgctctcgggagccgggccccaggcgctgggcgccgaggctgcggaacctcgccgggggcagctccggtcggccccctttcccgccggctggttccgagctcccggacctgccctgcccgcttctcctcgggcttgggaatttgccgaggcgacctaggcggctccggcggggaccgggagcccgaggtccgcggcgcgcctgccgggccaggagccagggagcgtcgcaagtttccaaggcgcgtgcgaggatccggcgtgcagtgttccgagctgggctgggcgccgagagcatgggcagcgacccgagcgcgcccggacggccgggctggacgggcagcctcctcggcgaccgggaggaggcggcgcggccgcgactgctgccgctgctcctggtgcttctgggctgcctgggccttggcgtagcggccgaagacgcggaggtccatgccgagaactggctgcggctttatggctacctgcctcagcccagccgccatatgtccaccatgcgttccgcccagatcttggcctcggcccttgcagagatgcagcgcttctacgggatcccagtcaccggtgtgctcgacgaagagaccaaggagtggatgaagcggccccgctgtggggtgccagaccagttcggggtacgagtgaaagccaacctgcggcggcgtcggaagcgctacgccctcaccgggaggaagtggaacaaccaccatctgacctttagcatccagaactacacggagaagttgggctggtaccactcgatggaggcggtgcgcagggccttccgcgtgtgggagcaggccacgcccctggtcttccaggaggtgccctatgaggacatccggctgcggcgacagaaggaggccgacatcatggtactctttgcctctggcttccacggcgacagctcgccgtttgatggcaccggtggctttctggcccacgcctatttccctggccccggcctaggcggggacacccattttgacgcagatgagccctggaccttctccagcactgacctgcatggaaacaacctcttcctggtggcagtgcatgagctgggccacgcgctggggctggagcactccagcaaccccaatgccatcatggcgccgttctaccagtggaaggacgttgacaacttcaagctgcccgaggacgatctccgtggcatccagcagctctacggtaccccagacggtcagccacagcctacccagcctctccccactgtgacgccacggcggccaggccggcctgaccaccggccgccccggcctccccagccaccacccccaggtgggaagccagagcggcccccaaagccgggccccccagtccagccccgagccacagagcggcccgaccagtatggccccaacatctgcgacggggactttgacacagtggccatgcttcgcggggagatgttcgtgttcaagggccgctggttctggcgagtccggcacaaccgcgtcctggacaactatcccatgcccatcgggcacttctggcgtggtctgcccggtgacatcagtgctgcctacgagcgccaagacggtcgttttgtctttttcaaaggtgaccgctactggctctttcgagaagcgaacctggagcccggctacccacagccgctgaccagctatggcctgggcatcccctatgaccgcattgacacggccatctggtgggagcccacaggccacaccttcttcttccaagaggacaggtactggcgcttcaacgaggagacacagcgtggagaccctgggtaccccaagcccatcagtgtctggcaggggatccctgcctcccctaaaggggccttcctgagcaatgacgcagcctacacctacttctacaagggcaccaaatactggaaattcgacaatgagcgcctgcggatggagcccggctaccccaagtccatcctgcgggacttcatgggctgccaggagcacgtggagccaggcccccgatggcccgacgtggcccggccgcccttcaacccccacgggggtgcagagcccggggcggacagcgcagagggcgacgtgggggatggggatggggactttggggccggggtcaacaaggacgggggcagccgcgtggtggtgcagatggaggaggtggcacggacggtgaacgtggtgatggtgctggtgccactgctgctgctgctctgcgtcctgggcctcacctacgcgctggtgcagatgcagcgcaagggtgcgccacgtgtcctgctttactgcaagcgctcgctgcaggagtgggtctgaccacccagcgctcctgctaacggtgctcagggggcgcctgtggttctgagatggctcccaggggctccctccgcccccaggtaggggcccctctcagccctcacacaccctgtctgccccgccctcattatttatgtccaggtgtttgttttgttttgtttttggcaccttacttgaccatttgtttctgtttccccgactggggcagggtgtttagaattttctaaatgtagttctgctccagacagggaattaggcccccatcatcctctggcttggccacagccaggggagcagaggggcagaggcccacattggaagagcagcacctcctcagcctgaaccccagggctgtaactgccaggctctctttgcccagttggagactgtctggcccccctggtcccctccttcccaagtgagtctctctgggccttaggaagagccttccacccaggggcagccccaggccaaaggggacctggaagggaggtgggccgtggcccttgagtccccattgaggcttggttccttcccaatccagtggacttcgcagtccacttctgacagcctcagtgaccctggctccttgtgccagagaacccagcccacccccggcagcagcccccagctcccacctccccttgggcccacacctccttccctctctggagaaagggccctgggcctgcctcaccacggaccaaagggagtctgccagggcccctctccccagggaagcagcagcctcgcccctggcagagatgcctccctgagctagaaccctctgttccttccctgtgcctcctccctccctctccgactcacaccactagcctcaggggtctgagctccagctcctttgggcttcagctgccagtgtcctgagccccagggagagggggctggtgggtgcctaggcctgggcagtggatggccgtgaatgggtgcccacagtgtcaggcactgggcatgaggggttcctcccctccagctccctgtgcccccagggtcctgggaggagagacactggtggggataggccagccgcgcatcagactgtgaaccccacgaaggagcccattgtggcctaagaggctgccctcctgtgctcagccctgaggacagatgcctccttcctcttttccttcccaaagcaagcaagaggccgtggctgctgtgggaaatggtactgtacagctggctctacttccccatggccctgagcgagtggagtctgccacccaggatccccaaggcacttgagggggaaggattctgctggcctctgcgagtggtttcttgtgcactggcaccaagtgcgggtccggcagcttctgccccctgcagaaccggagagccagctaaggggtggggctgcgggggttccgtgtccacccccatacatttatttctgtaaataatgtgcactgaataaattgtacagccggcaaaaaaaaaaaaaaaaaaaaa

SEQ ID NO: 137 - protein, 669 aa, Homo sapiens
  MMP-15 precursor
MGSDPSAPGRPGWTGSLLGDREEAARPRLLPLLLVLLGCLGLGVAAEDAEVHAENWLRLYGYLPQPSRHMSTMRSAQILASALAEMQRFYGIPVTGVLDEETKEWMKRPRCGVPDQFGVRVKANLRRRRKRYALTGRKWNNHHLTFSIQNYTEKLGWYHSMEAVRRAFRVWEQATPLVFQEVPYEDIRLRRQKEADIMVLFASGFHGDSSPFDGTGGFLAHAYFPGPGLGGDTHFDADEPWTFSSTDLHGNNLFLVAVHELGHALGLEHSSNPNAIMAPFYQWKDVDNFKLPEDDLRGIQQLYGTPDGQPQPTQPLPTVTPRRPGRPDHRPPRPPQPPPPGGKPERPPKPGPPVQPRATERPDQYGPNICDGDFDTVAMLRGEMFVFKGRWFWRVRHNRVLDNYPMPIGHFWRGLPGDISAAYERQDGRFVFFKGDRYWLFREANLEPGYPQPLTSYGLGIPYDRIDTAIWWEPTGHTFFFQEDRYWRFNEETQRGDPGYPKPISVWQGIPASPKGAFLSNDAAYTYFYKGTKYWKFDNERLRMEPGYPKSILRDFMGCQEHVEPGPRWPDVARPPFNPHGGAEPGADSAEGDVGDGDGDFGAGVNKDGGSRVVVQMEEVARTVNVVMVLVPLLLLLCVLGLTYALVQMQRKGAPRVLLYCKRSLQEWV

SEQ ID NO: 138 - protein, 529 aa, Homo sapiens
  MMP-15 mature
YALTGRKWNNHHLTFSIQNYTEKLGWYHSMEAVRRAFRVWEQATPLVFQEVPYEDIRLRRQKEADIMVLFASGFHGDSSPFDGTGGFLAHAYFPGPGLGGDTHFDADEPWTFSSTDLHGNNLFLVAVHELGHALGLEHSSNPNAIMAPFYQWKDVDNFKLPEDDLRGIQQLYGTPDGQPQPTQPLPTVTPRRPGRPDHRPPRPPQPPPPGGKPERPPKPGPPVQPRATERPDQYGPNICDGDFDTVAMLRGEMFVFKGRWFWRVRHNRVLDNYPMPIGHFWRGLPGDISAAYERQDGRFVFFKGDRYWLFREANLEPGYPQPLTSYGLGIPYDRIDTAIWWEPTGHTFFFQEDRYWRFNEETQRGDPGYPKPISVWQGIPASPKGAFLSNDAAYTYFYKGTKYWKFDNERLRMEPGYPKSILRDFMGCQEHVEPGPRWPDVARPPFNPHGGAEPGADSAEGDVGDGDGDFGAGVNKDGGSRVVVQMEEVARTVNVVMVLVPLLLLLCVLGLTYALVQMQRKGAPRVLLY

SEQ ID NO: 139 - DNA, 6347 bp, Homo sapiens
  MMP-16
tctttgagccggaaccgccggtgaacttaggcgccacgttcccggtgactgaccccggaggatggtgaacaggaactactgctgaccctgtcttcgccgctgcctctcgggggctgccgagcgcggggcccctgtctcctccccttgcccggctgtgggtgaacctgcaggctccttacccacccggaggacttttttttgaaaggaaacgagggagggagggagagggagagagggagaaaacgaaggggagctcgtccatccattgaagcacagttcactatgatcttactcacattcagcactggaagacggttggatttcgtgcatcattcgggggtgtttttcttgcaaaccttgctttggattttatgtgctacagtctgcggaacggagcagtatttcaatgtggaggtttggttacaaaagtacggctaccttccaccgactgaccccagaatgtcagtgctgcgctctgcagagaccatgcagtctgccctagctgccatgcagcagttctatggcattaacatgacaggaaaagtggacagaaacacaattgactggatgaagaagccccgatgcggtgtacctgaccagacaagaggtagctccaaatttcatattcgtcgaaagcgatatgcattgacaggacagaaatggcagcacaagcacatcacttacagtataaagaacgtaactccaaaagtaggagaccctgagactcgtaaagctattcgccgtgcctttgatgtgtggcagaatgtaactcctctgacatttgaagaagttccctacagtgaattagaaaatggcaaacgtgatgtggatataaccattatttttgcatctggtttccatggggacagctctccctttgatggagagggaggatttttggcacatgcctacttccctggaccaggaattggaggagatacccattttgactcagatgagccatggacactaggaaatcctaatcatgatggaaatgacttatttcttgtagcagtccatgaactgggacatgctctgggattggagcattccaatgaccccactgccatcatggctccattttaccagtacatggaaacagacaacttcaaactacctaatgatgatttacagggcatccagaagatatatggtccacctgacaagattcctccacctacaagacctctaccgacagtgcccccacaccgctctattcctccggctgacccaaggaaaaatgacaggccaaaacctcctcggcctccaaccggcagaccctcctatcccggagccaaacccaacatctgtgatgggaactttaacactctagctattcttcgtcgtgagatgtttgttttcaaggaccagtggttttggcgagtgagaaacaacagggtgatggatggatacccaatgcaaattacttacttctggcggggcttgcctcctagtatcgatgcagtttatgaaaatagcgacgggaattttgtgttctttaaaggtaacaaatattgggtgttcaaggatacaactcttcaacctggttaccctcatgacttgataacccttggaagtggaattccccctcatggtattgattcagccatttggtgggaggacgtcgggaaaacctatttcttcaagggagacagatattggagatatagtgaagaaatgaaaacaatggaccctggctatcccaagccaatcacagtctggaaagggatccctgaatctcctcagggagcatttgtacacaaagaaaatggctttacgtatttctacaaaggaaaggagtattggaaattcaacaaccagatactcaaggtagaacctggatatccaagatccatcctcaaggattttatgggctgtgatggaccaacagacagagttaaagaaggacacagcccaccagatgatgtagacattgtcatcaaactggacaacacagccagcactgtgaaagccatagctattgtcattccctgcatcttggccttatgcctccttgtattggtttacactgtgttccagttcaagaggaaaggaacaccccgccacatactgtactgtaaacgctctatgcaagagtgggtgtgatgtagggttttttcttctttctttcttttgcaggagtttgtggtaacttgagattcaagacaagagctgttatgctgtttcctagctaggagcaggcttgtggcagcctgattcggggctgacctttcaaacccagagggttgctggtcctgcacatgagtggaaatacactcatggggaagcttccatgatgcacagtatctgctgttcttcagtcctttgtctttctttgtcattcagttctaggcctttcctctgcacgctcaatgcccagtaaaatttcaggattaactaaagaagaggagaaaaagaagaaaagattcttcttaaaagtttctaatgttattttccttctgaagtctgagcccatttctggggggagaaaaaaaaagcaaatcagaaaacccacggtttttctttttttctttttttctttttttctttttttgctttaaaacaaagggaaaaaagagtttaaacaaaaaacccacaattgaacttccaggaaagtgtgaagacccaaaacagctttgtctccaaagaagatagctctctgactgctttggatagtctcctacgcaccattttgtcaggtgggagatttggaatacacatgcaggacgttagactgttgggacagccattttccaacaaccaaggggccaaaatatctgcaatatagtaacagccttaataatacatccatttttcgttttatacagctgttctcagctatgtcctcagtgtttcatcgcatttatattcatagctattttcaaacacgaccttttaattgtttttgaagtatttctaaaccccttctttccaccttactcctccatcattgtgataatcttcccaagttgtattaggccattgccccaggccttccatgggtctgtcaggaatattcgttacaaagcagagcaagaagcagtatgtctctgaagtggattacagtggcagttattttacaaggatttgtgacactagtaacatacccgtgtaaccctttgagaactatcagaccagctttcagagtcttaggattgtcggtcttgcgatctgataaattatagaactgggcaatggtaaaaacagtcacaagttcaagaagttcaggtttttaaaacagatatcctataatgtcatataatttttaaatgatttacaagactacataaatgtgtttataacaaacagaaatgatgttacttgccaaaatttttctggcaaataaaaaaggtattttattaagattctcataaatctgaaattttatttgaaaaactgataatagcctaagtcttcttttcttttttttaggcatactgaatttctgttttaaaatccattgcatgaaaattcaatttgccttggtatatgcagttagcattgccattttaaaaatgaattaaaacggtgactctgaagttgcatgaatatcctccagtgcattacctattgcatgtccaccatagttctcaaagggttagtgtggcttctggcatttagccgtccatttgatcactgacagagccaagagaccaccaaagcatttcattgttgagtgtaatttgtcctaacagcagtattgtcattttcatgtgacctgcagagcaggtttgtatcaatatttttttcctagagaaaagtcagcaactgacagacctctttattgatttttaggagctgcttcttgcagtgaaaggctttacagccactgggctgtgaacttattagagatggtcagaatgaatgcaccccatgagtcagacattggctttgtgtgaaagccagctttgaggggattagcttttgaaacaatgaacagcttgccttgaacttgattattgatctattgactgtcattaacaacaacttaaacattgtcttctgtgaaaattttccttgaagagtcctgttctatgtctttgccctttgacctttaacttgcaaactggcacaaactgaaggaaatctggtgttgcttctccattggattagttgttctctaaaacctagtaagcatgagctgtttccttagagtggagagagtggtgatggcagatctgcagatggacactttgctctttacatgcacactctgaaaatgccctataggtagaagtgaattttaatttcattttaatataatttcaagtctaaattcatcattttagtacaaattacaaaaactataggaaaaaaaaaacctcaaatacttgaatggccagtgtggcttttatataaagcaggaattttatactagtaaaaatttcttactcatttgctaatacacatttccagatgatttttaatgagtgtaggtatacattcttatttggaaatggatagtttggctgccttgaatttatatttatactcaacgtagcatgaaaattagaatgccttttggttaaactacatgtttatgatttggttggggaaaatattttataattgtgggtggcatgctgcaaagccttgcagattgttatttcttacaacctgagcgtatatagtatgagcctaagaaaaaagaagagtaagaaaagaagaatggctttacagtaaaatatcatacaatgcagacaatattttaagaggatattggagattatgtacgcaagggccaagaaagcaagaaatgagaaccagagtcagccctgtagctttacttcagtgcttccattctagatgatgctgatattataaagagttagtcactgctgctaagcatggaggactatatacataagctcgtttatacagtgtttgcttgtgggagggtttaatccttttagggccttgatgtcaagaaaaaaataactggaaactatattttgctaaagatagaaatgaggaactgtgtcattttgggacatgtgcaaatcattgaggaactccatcaccctgcattgaaaattgatttttttttcctctaaaatgagaaagaaactgaataagcaatctgttgcctctttactcattcatcacaatatcctgattcgtcataaggctatcagtatataagggctagaaaataatcatagcattaagaaggaaggagtctatcattatgcttgaattctggcaaatgtcatgaataagggttgggtcatatttactttaatatgagacaagatttatgtgataagcaaaggcatataaggctgctcttttgaacagaacatttcagttatcaggctgtactattacaagagataagaagacaataaggacaatgtaatcacaaacagtgggattccatttgtttattgtacaccagctactttgtgggtatggttcctgactcctcttctacatgaggtttgggaaaaaagtctcaaaccaaatggaacagtgaaagggaaagtaattcatctagcacataagaatagtgattcaaaaccaatgcagaataaatttccatgggtcaataacataaggtgtcagttcagtgttactagagatatgcaaggcataaaatattttcatcaccccatcactaataacatgaaaagctcagacataggatttcccaaattgaaatgaaaacacattcatgcctgcaaaaataattctccttctgcttcatttctcattactttatctaatataaacacaaatgtaaacaaggtaatggtcttcatgtaaaatgaccatatagttaagaattttagtaaaatattgttgttctgtgtattattaaacaaatgcaatgaagtattaaaatagctgatcagtttgaatttcctgtaaagcagtaattccgcatcagaattgtagataaggttgtgaatttattgactcatttcagaacagtgtctgttgacatggcagtcagagcaggtgaatacagatgctctttctgattgcaaaggttatagagctaaattagacagcattatgtgatactagcaaagacaacttctgttataaatcagagggcaaggcttttctgaatcgatgtgataaattactaagtaatgattaccaaaaataattactaagtaataaaagatacagactggtttactgaaataagcaagtgttacatttaataattacctataatctttttttgttaacacataagcaagtgttacctttaataattacctataatctttttttgttaacacataatttggccatttcatatactgtgtacctattttcattccctctctgtgggtcattaaaaaacacaatgtggtggataaaaaaaaaaaaaa

SEQ ID NO: 140 - protein, 607 aa, Homo sapiens
  MMP-16 precursor
MILLTFSTGRRLDFVHHSGVFFLQTLLWILCATVCGTEQYFNVEVWLQKYGYLPPTDPRMSVLRSAETMQSALAAMQQFYGINMTGKVDRNTIDWMKKPRCGVPDQTRGSSKFHIRRKRYALTGQKWQHKHITYSIKNVTPKVGDPETRKAIRRAFDVWQNVTPLTFEEVPYSELENGKRDVDITIIFASGFHGDSSPFDGEGGFLAHAYFPGPGIGGDTHFDSDEPWTLGNPNHDGNDLFLVAVHELGHALGLEHSNDPTAIMAPFYQYMETDNFKLPNDDLQGIQKIYGPPDKIPPPTRPLPTVPPHRSIPPADPRKNDRPKPPRPPTGRPSYPGAKPNICDGNFNTLAILRREMFVFKDQWFWRVRNNRVMDGYPMQITYFWRGLPPSIDAVYENSDGNFVFFKGNKYWVFKDTTLQPGYPHDLITLGSGIPPHGIDSAIWWEDVGKTYFFKGDRYWRYSEEMKTMDPGYPKPITVWKGIPESPQGAFVHKENGFTYFYKGKEYWKFNNQILKVEPGYPRSILKDFMGCDGPTDRVKEGHSPPDDVDIVIKLDNTASTVKAIAIVIPCILALCLLVLVYTVFQFKRKGTPRHILYCKRSMQEWV

SEQ ID NO: 141 - protein, 481 aa, Homo sapiens
  MMP-16 mature
YALTGQKWQHKHITYSIKNVTPKVGDPETRKAIRRAFDVWQNVTPLTFEEVPYSELENGKRDVDITIIFASGFHGDSSPFDGEGGFLAHAYFPGPGIGGDTHFDSDEPWTLGNPNHDGNDLFLVAVHELGHALGLEHSNDPTAIMAPFYQYMETDNFKLPNDDLQGIQKIYGPPDKIPPPTRPLPTVPPHRSIPPADPRKNDRPKPPRPPTGRPSYPGAKPNICDGNFNTLAILRREMFVFKDQWFWRVRNNRVMDGYPMQITYFWRGLPPSIDAVYENSDGNFVFFKGNKYWVFKDTTLQPGYPHDLITLGSGIPPHGIDSAIWWEDVGKTYFFKGDRYWRYSEEMKTMDPGYPKPITVWKGIPESPQGAFVHKENGFTYFYKGKEYWKFNNQILKVEPGYPRSILKDFMGCDGPTDRVKEGHSPPDDVDIVIKLDNTASTVKAIAIVIPCILALCLLVLVYTVFQFKRKGTPRHILYCK

SEQ ID NO: 142 - DNA, 2438 bp, Homo sapiens
  MMP-17
ccggcgggggcgccgcggagagcggagggcgccgggctgcggaacgcgaagcggagggcgcgggaccctgcacgccgcccgcgggcccatgtgagcgccatgcggcgccgcgcagcccggggacccggcccgccgcccccagggcccggactctcgcggttgccgctgctgccgctgccgctgctgctgctgctggcgctggggacccgcgggggctgcgccgcgcccgcacccgcgccgcgcgccgaggacctcagcctgggagtggagtggctaagcaggttcggttacctgcccccggctgaccccacaacagggcagctgcagacgcaagaggagctgtctaaggccatcacagccatgcagcagtttggtggcctggaggccaccggcatcctggacgaggccaccctggccctgatgaaaaccccacgctgctccctgccagacctccctgtcctgacccaggctcgcaggagacgccaggctccagcccccaccaagtggaacaagaggaacctgtcgtggagggtccggacgttcccacgggactcaccactggggcacgacacggtgcgtgcactcatgtactacgccctcaaggtctggagcgacattgcgcccctgaacttccacgaggtggcgggcagcaccgccgacatccagatcgacttctccaaggccgaccataacgacggctaccccttcgacggccccggcggcaccgtggcccacgccttcttccccggccaccaccacaccgccggggacacccactttgacgatgacgaggcctggaccttccgctcctcggatgcccacgggatggacctgtttgcagtggctgtccacgagtttggccacgccattgggttaagccatgtggccgctgcacactccatcatgcggccgtactaccagggcccggtgggtgacccgctgcgctacgggctcccctacgaggacaaggtgcgcgtctggcagctgtacggtgtgcgggagtctgtgtctcccacggcgcagcccgaggagcctcccctgctgccggagcccccagacaaccggtccagcgccccgcccaggaaggacgtgccccacagatgcagcactcactttgacgcggtggcccagatccgcggtgaagctttcttcttcaaaggcaagtacttctggcggctgacgcgggaccggcacctggtgtccctgcagccggcacagatgcaccgcttctggcggggcctgccgctgcacctggacagcgtggacgccgtgtacgagcgcaccagcgaccacaagatcgtcttctttaaaggagacaggtactgggtgttcaaggacaataacgtagaggaaggatacccgcgccccgtctccgacttcagcctcccgcctggcggcatcgacgctgccttctcctgggcccacaatgacaggacttatttctttaaggaccagctgtactggcgctacgatgaccacacgaggcacatggaccccggctaccccgcccagagccccctgtggaggggtgtccccagcacgctggacgacgccatgcgctggtccgacggtgcctcctacttcttccgtggccaggagtactggaaagtgctggatggcgagctggaggtggcacccgggtacccacagtccacggcccgggactggctggtgtgtggagactcacaggccgatggatctgtggctgcgggcgtggacgcggcagaggggccccgcgcccctccaggacaacatgaccagagccgctcggaggacggttacgaggtctgctcatgcacctctggggcatcctctcccccgggggccccaggcccactggtggctgccaccatgctgctgctgctgccgccactgtcaccaggcgccctgtggacagcggcccaggccctgacgctatgacacacagcgcgagcccatgagaggacagaggcggtgggacagcctggccacagagggcaaggactgtgccggagtccctgggggaggtgctggcgcgggatgaggacgggccaccctggcaccggaaggccagcagagggcacggcccgccagggctgggcaggctcaggtggcaaggacggagctgtcccctagtgagggactgtgttgactgacgagccgaggggtggccgctccagaagggtgcccagtcaggccgcaccgccgccagcctcctccggccctggagggagcatctcgggctgggggcccacccctctctgtgccggcgccaccaaccccacccacactgctgcctggtgctcccgccggcccacagggcctccgtccccaggtccccagtggggcagccctccccacagacgagccccccacatggtgccgcggcacgtcccccctgtgacgcgttccagaccaacatgacctctccctgctttgtaaaaaaaaaaaaaaaaaaa

SEQ ID NO: 143 - protein, 606 aa, Homo sapiens
  MMP-17 precursor
MRRRAARGPGPPPPGPGLSRLPLLPLPLLLLLALGTRGGCAAPAPAPRAEDLSLGVEWLSRFGYLPPADPTTGQLQTQEELSKAITAMQQFGGLEATGILDEATLALMKTPRCSLPDLPVLTQARRRRQAPAPTKWNKRNLSWRVRTFPRDSPLGHDTVRALMYYALKVWSDIAPLNFHEVAGSTADIQIDFSKADHNDGYPFDGPGGTVAHAFFPGHHHTAGDTHFDDDEAWTFRSSDAHGMDLFAVAVHEFGHAIGLSHVAAAHSIMRPYYQGPVGDPLRYGLPYEDKVRVWQLYGVRESVSPTAQPEEPPLLPEPPDNRSSAPPRKDVPHRCSTHFDAVAQIRGEAFFFKGKYFWRLTRDRHLVSLQPAQMHRFWRGLPLHLDSVDAVYERTSDHKIVFFKGDRYWVFKDNNVEEGYPRPVSDFSLPPGGIDAAFSWAHNDRTYFFKDQLYWRYDDHTRHMDPGYPAQSPLWRGVPSTLDDAMRWSDGASYFFRGQEYWKVLDGELEVAPGYPQSTARDWLVCGDSQADGSVAAGVDAAEGPRAPPGQHDQSRSEDGYEVCSCTSGASSPPGAPGPLVAATMLLLLPPLSPGALWTAAQALTL

SEQ ID NO: 144 - protein, 478 aa, Homo sapiens
  MMP-17mature
QAPAPTKWNKRNLSWRVRTFPRDSPLGHDTVRALMYYALKVWSDIAPLNFHEVAGSTADIQIDFSKADHNDGYPFDGPGGTVAHAFFPGHHHTAGDTHFDDDEAWTFRSSDAHGMDLFAVAVHEFGHAIGLSHVAAAHSIMRPYYQGPVGDPLRYGLPYEDKVRVWQLYGVRESVSPTAQPEEPPLLPEPPDNRSSAPPRKDVPHRCSTHFDAVAQIRGEAFFFKGKYFWRLTRDRHLVSLQPAQMHRFWRGLPLHLDSVDAVYERTSDHKIVFFKGDRYWVFKDNNVEEGYPRPVSDFSLPPGGIDAAFSWAHNDRTYFFKDQLYWRYDDHTRHMDPGYPAQSPLWRGVPSTLDDAMRWSDGASYFFRGQEYWKVLDGELEVAPGYPQSTARDWLVCGDSQADGSVAAGVDAAEGPRAPPGQHDQSRSEDGYEVCSCTSGASSPPGAPGPLVAATMLLLLPPLSPGALWTAAQALTL

SEQ ID NO: 145 - DNA, 3262 bp, Homo sapiens
  MMP-19
ggctggagagtaaaaagaactgggggtaagagcccctctgcctagcactgctcccccaaggctcccagaaatctcaggtcagaggcacggacagcctctggagctctcgtctggtgggaccatgaactgccagcagctgtggctgggcttcctactccccatgacagtctcaggccgggtcctggggcttgcagaggtggcgcccgtggactacctgtcacaatatgggtacctacagaagcctctagaaggatctaataacttcaagccagaagatatcaccgaggctctgagagcttttcaggaagcatctgaacttccagtctcaggtcagctggatgatgccacaagggcccgcatgaggcagcctcgttgtggcctagaggatcccttcaaccagaagacccttaaatacctgttgctgggccgctggagaaagaagcacctgactttccgcatcttgaacctgccctccacccttccaccccacacagcccgggcagccctgcgtcaagccttccaggactggagcaatgtggctcccttgaccttccaagaggtgcaggctggtgcggctgacatccgcctctccttccatggccgccaaagctcgtactgttccaatacttttgatgggcctgggagagtcctggcccatgccgacatcccagagctgggcagtgtgcacttcgacgaagacgagttctggactgaggggacctaccgtggggtgaacctgcgcatcattgcagcccatgaagtgggccatgctctggggcttgggcactcccgatattcccaggccctcatggccccagtctacgagggctaccggccccactttaagctgcacccagatgatgtggcagggatccaggctctctatggcaagaagagtccagtgataagggatgaggaagaagaagagacagagctgcccactgtgcccccagtgcccacagaacccagtcccatgccagacccttgcagtagtgaactggatgccatgatgctggggccccgtgggaagacctatgctttcaagggggactatgtgtggactgtatcagattcaggaccgggccccttgttccgagtgtctgccctttgggaggggctccccggaaacctggatgctgctgtctactcgcctcgaacacaatggattcacttctttaagggagacaaggtgtggcgctacattaatttcaagatgtctcctggcttccccaagaagctgaatagggtagaacctaacctggatgcagctctctattggcctctcaaccaaaaggtgttcctctttaagggctccgggtactggcagtgggacgagctagcccgaactgacttcagcagctaccccaaaccaatcaagggtttgtttacgggagtgccaaaccagccctcggctgctatgagttggcaagatggccgagtctacttcttcaagggcaaagtctactggcgcctcaaccagcagcttcgagtagagaaaggctatcccagaaatatttcccacaactggatgcactgtcgtccccggactatagacactaccccatcaggtgggaataccactccctcaggtacgggcataaccttggataccactctctcagccacagaaaccacgtttgaatactgactgctcacccacagacacaatcttggacattaacccctgaggctccaccacccaccctttcatttcccccccagaagcctaaggcctaatagctgaatgaaatacctgtctgctcagtagaaccttgcaggtgctgtagcaggcgcaagaccgtagatctcaggcctctaacacttccaactccagccaccactttcctgtgcattttcactcctgagaagtgctcccctaactcagatcccctaacttagatttggcccccaactccatttcctgtctgtcttagacagcccttccaactgtgtcatctcttctctggaggtcaatggtggagggagatgcctgggtcctgttcttcctacataaaatgcaagaaaacagcatggccagtaaactgagcaagggccttggaatccttgagaatcacatttatgtgcttatgattacgggcaagctaattaaccttgttgaatctcagattccccatttgcaacattaggttaagaccagtactgcaggattgttgcactaaatgaaatactgtatgtgaagtgcctggcacagtgtctggtacatttgtgtttaataaaagctaactccatgttcataagagaggactgaacagctcttcctctagctgtctggctgtataactcttacagtagtctgtataataagggcatctctattagatctttaggggacagaggatttgtcaagatggttagctctttgttttggggtgcagagaaagaaaagagcagcaacagcagaggctggactccctggttcagtatttaatgccattttattcacatgctcccatgttctccctccctcccattgtagccttgctgcccaggggagggatatgtcttcctttatgcatctgggaaaccaggaacagaccctgcgcaggagagtcagagggggaagagttagaatgggtcagtggctggaacaaagttctggttaaggaggaaattagtgccacccacggtgagaagcagagaaggcacttgcatcctatgcagccctgaagaccaggctcctttgggcaaaaggcaagactctggcaggtgggtcaatgctctctccttggagcaagaagccagcttttggggaaggcaggtcctgaggcaggcactgccctgtggtcttccccaggttgaggagagaagtggaagccccatggaagacagtgctcccagctgaggtaggaggcggaggtgggggtgggggtagtttaagcctatggggcccagggggaaaggccaaacagaaacccaactaccccctaatgaagggcctggaggttggggtatcttggagctcctcagagcccttcttcccatcaaaaaggtatcaaatgccttggaagctccctgatcctacaaaacaaaaaaatgcttatttttaccactgtgaggcaagctgaggtgaacatttaaaaggctatttcaagacgaggtgcggtggctataatcctagcactttgggaggctgaagcaggaggatcacttgagcccaggagttcaagaccagcttgggcaacatagggagaccctgtctctgcaaaaaaataaaaacgaatacataaaaattaaaaaaaaa

SEQ ID NO: 146 - protein, 508 aa, Homo sapiens
  MMP-19 precursor
MNCQQLWLGFLLPMTVSGRVLGLAEVAPVDYLSQYGYLQKPLEGSNNFKPEDITEALRAFQEASELPVSGQLDDATRARMRQPRCGLEDPFNQKTLKYLLLGRWRKKHLTFRILNLPSTLPPHTARAALRQAFQDWSNVAPLTFQEVQAGAADIRLSFHGRQSSYCSNTFDGPGRVLAHADIPELGSVHFDEDEFWTEGTYRGVNLRIIAAHEVGHALGLGHSRYSQALMAPVYEGYRPHFKLHPDDVAGIQALYGKKSPVIRDEEEEETELPTVPPVPTEPSPMPDPCSSELDAMMLGPRGKTYAFKGDYVWTVSDSGPGPLFRVSALWEGLPGNLDAAVYSPRTQWIHFFKGDKVWRYINFKMSPGFPKKLNRVEPNLDAALYWPLNQKVFLFKGSGYWQWDELARTDFSSYPKPIKGLFTGVPNQPSAAMSWQDGRVYFFKGKVYWRLNQQLRVEKGYPRNISHNWMHCRPRTIDTTPSGGNTTPSGTGITLDTTLSATETTFEY

SEQ ID NO: 147 - protein, 411 aa, Homo sapiens
  MMP-19 mature
YLLLGRWRKKHLTFRILNLPSTLPPHTARAALRQAFQDWSNVAPLTFQEVQAGAADIRLSFHGRQSSYCSNTFDGPGRVLAHADIPELGSVHFDEDEFWTEGTYRGVNLRIIAAHEVGHALGLGHSRYSQALMAPVYEGYRPHFKLHPDDVAGIQALYGKKSPVIRDEEEEETELPTVPPVPTEPSPMPDPCSSELDAMMLGPRGKTYAFKGDYVWTVSDSGPGPLFRVSALWEGLPGNLDAAVYSPRTQWIHFFKGDKVWRYINFKMSPGFPKKLNRVEPNLDAALYWPLNQKVFLFKGSGYWQWDELARTDFSSYPKPIKGLFTGVPNQPSAAMSWQDGRVYFFKGKVYWRLNQQLRVEKGYPRNISHNWMHCRPRTIDTTPSGGNTTPSGTGITLDTTLSATETTFEY

SEQ ID NO: 148 - DNA, 1674 bp, Homo sapiens
  MMP-20
ctactgtgaggggatgaaggtgctccctgcatctggccttgctgtcttcctcatcatggctttgaagttttccactgcagccccctccctagttgcagcctcccccaggacctggaggaacaactaccgcctcgcacaggcgtatcttgacaaatattacacaaataaagaaggacaccagattggtgagatggttgcaagaggaagcaattccatgataaggaagattaaggagctacaagcgttctttggcctccaagtcaccgggaagttagaccagaccacaatgaacgtgatcaagaagcctcgctgtggagttcctgatgtggccaattatcgcctcttccctggtgaacccaaatggaaaaaaaatactttgacatacagaatatctaaatacacaccttccatgagttctgtcgaggtggacaaagcagtggagatggccttgcaggcctggagtagcgccgtccctctgagctttgtcagaataaactcaggagaagcggatattatgatatcttttgaaaatggagatcacggggattcctatccattcgatgggcctcgggggactctagcccatgcatttgctcctggagaaggcctgggaggagatacacatttcgacaatcctgagaagtggactatgggaacgaatggttttaatttgtttaccgttgctgctcatgaatttggccatgccctgggcctggcccattccacagacccatcagcactgatgtacccaacttataagtacaagaatccctatggattccacctccccaaagatgatgtgaaagggatccaggcattatacggacctcggaaagtattcctggggaagcccactctgccccatgccccccatcacaagccatccatccctgacctctgtgactccagctcatcctttgacgctgtgacaatgctggggaaggagctcctgctcttcaaggaccggattttctggagacggcaggttcacttgcggacaggaattcggcccagcactattaccagctccttcccccagctcatgtccaatgtggatgcagcttacgaagtggctgagaggggcactgcttacttcttcaaaggtccccactactggataacaagaggattccaaatgcaaggtcctcctcggactatttatgactttggatttccaaggcacgtgcagcaaatagatgctgctgtctacctcagggagccacagaagacccttttctttgtgggagatgaatactacagctacgacgaaaggaaaaggaaaatggaaaaagactatccaaagaatactgaagaagaattttcaggagtaaatggccaaatcgatgctgctgtagaattaaatggctacatttacttcttttcaggaccaaaaacatacaagtatgacacagagaaggaagatgtggttagtgtggtgaaatctagttcctggattggttgctaaatagaaaagcctagtcttctcaagcaatgaggatgactacaagcagcctctaactggatcttaaggactaaagcagaatgtaggagagggattcttccaaaggccttcaaatcaaattagaattcactgagaataataatacttccaatttttttcatagttgtataatcagaatttcaatccacattagaaaagtttttatatgggca

SEQ ID NO: 149 - protein, 483 aa, Homo sapiens [sequence omitted]

SEQ ID NO: 150 - protein, 373 aa, Homo sapiens
  MMP-20 mature
YRLFPGEPKWKKNTLTYRISKYTPSMSSVEVDKAVEMALQAWSSAVPLSFVRINSGEADIMISFENGDHGDSYPFDGPRGTLAHAFAPGEGLGGDTHFDNAEKWTMGTNGFNLFTVAAHEFGHALGLAHSTDPSALMYPTYKYKNPYGFHLPKDDVKGIQALYGPRKVFLGKPTLPHAPHHKPSIPDLCDSSSSFDAVTMLGKELLLFKDRIFWRRQVHLRTGIRPSTITSSFPQLMSNVDAAYEVAERGTAYFFKGPHYWITRGFQMQGPPRTIYDFGFPRHVQQIDAAVYLREPQKTLFFVGDEYYSYDERKRKMEKDYPKNTEEEFSGVNGQIDAAVELNGYIYFFSGPKTYKYDTEKEDVVSVVKSSSW

SEQ ID NO: 151 - DNA, 3127 bp, Xenopus laevis
  XMMP
tcgtggagcactacagaatatgccgcacagagtcagcagaacggcagcagatgcatcagcatcatatgaggccaccatgccttctatcaagcttctggtttggtgctgcttgtgtgtgatatcccccaggctgtgccattctgagaagctcttccacagtcgggatcggtcagaccttcagccctcagcaattgaacaggcagaactggtcaaggatatgctctctgcccagcaattcctggcaaaatatgggtggacacaaccagttatttgggatccatcaagtaccaatgaaaacgaacctctaaaagatttcagtctgatgcaagagggagtttgtaacccaaggcaagaagtggctgagccaacaaaaagcccccaattcattgacgcgctcaaaaagtttcagaagctaaacaacttgccagtgacaggaacccttgatgatgccaccatcaacgccatgaacaagccacggtgcggcgtgccagacaaccaaatggcaaagaaagagacggagaaaccgacagcagcacagtcacttgaaaacaagactaaggattctgagaatgttactcaacaaaacccagacccccccaagattcggaggaagaggttcttagatatgttaatgtactcaaacaagtacagggaagaacaggaggcgcttcagaaatccacaggcaaagtcttcaccaaaaagctgctgaaatggagaatgattggagaaggctacagcaatcagctttccatcaacgagcaaagatatgtcttcaggctggctttccgcatgtggagtgaagtcatgccactggactttgaagaagataacacctcccctctatcccaaattgatatcaaacttggattcggacgaggtcgccatttaggctgtagccgggcattcgatggctctgggcaggagttcgcccacgcttggtttctgggggacattcactttgacgacgatgaacattttactgctcccagtagtgagcatgggattagtctgctgaaggtggcagcccatgaaattggccatgttcttggattatctcacatccacagggtgggatcaataatgcagcccaattacattccgcaggactctggctttgagctggacttgtctgacaggagagccatacagaacctatacggctcatgtgaaggcccctttgacacagcgtttgactggatctataaagagaagaaccaatacggggagcttgttgttcgatacaacacctacttttttcgcaacagctggtactggatgtatgagaatcggagcaacaggacccgatacggggatccacttgcaattgccaacggctggcacggaattcccgtacagaatattgatgcttttgttcatgtctggacctggacaagagacgcctcctacttttttaaaggtactcagtactggcgctacgatagtgaaaatgacaaagcctatgctgaagatgcacagggaaagagctaccctcgcctaatctcagaagggtttcctggaatcccaagccccatcaatgctgcctattttgacaggagaagacagtacatttacttcttcagggactcccaggtttttgcctttgatatcaacagaaacagagttgcgccagacttccccaaaagaatcttggactttttcccagccgtcgcagcaaacaatcaccccaagggcaacatagacgtggcctattattcctacacatacagctccttatttctcttcaaaggaaaagagttttggaaagtcgtcagcgacaaggacaggaggcaaaacccgtctcttccatacaatggattgttccccagaagagcaatatctcagcagtggtttgatatctgcaacgtacacccttcattgctgaaaatttgatttgcccaaaatagcccagcctgaataatagtcatgcactgaggttttctaaagtcttcttctgcccttgtcccacctgtgcactcacctgtagcatggacagcccaaaatagcccagcctgaataatagtcatccactgaggttttctaaagtcttcttctgcccttgtcccacctgtgcactcacctgtagcatggacatactcccagatgattgacctttctacaactctacttccagagtgtccatgtctaagaatttcttagtaaaagagttgactagactattgtattgtttcctaaacgcagccataaaggagctccaacagcacaagattccaggaagccattccctcaattcataaaggacaggagtgtgcgctccaataatggctaatatatgtacattattaaacacaagaatgggagaaatccattcgagaaaaaagtatttattagttgagatgaatcccaatttgggaagattgagagttgaacaaggatccttattatgtatctgcttaaatgttttatttatccatttttgcttgagtttctgcttcgattaggaagtattggagcatgattcataatgattgaactgatgtgaacttctccagaatgcacttctaaacacaaacataatactgatggaggaggaataattgtatggggatagaggctccatagaaggcaaactttaaggctgcaataatatcgtggtcaaatatgtgctttctcattggtggtaaaggtttattgaaggccctttgcttcttctgctcaacagtggaccatgtgctcaaagtaagctccctacacaatggttgatggaaatgtgactggtctgcatgaagccctcaacccaactgaacaactgtgggatgaattggaccatggattaagggagccaggccggatcattgaagccggacctcactcatgcttttgtggttgaagagcaaatcccaccactaatcttccaagacctagaggaaagcctttccagaagagcagaggctgttgcagcaaaggaatgtctaactctatatcaaaaccttcaggcttcagaattgcatgttctcattaataaatgtgtagcatcgggactctatagctcttaaaggccgtgcatgtttgatttagaaagatacacttgatgttattactgagctttatacagcactgttattctgcacaaataaaacttttactttacaaaaaaaaaaaaaaaaa

SEQ ID NO: 152 - protein, 604 aa, Xenopus laevis
  XMMP precursor
MPSIKLLVWCCLCVISPRLCHSEKLFHSRDRSDLQPSAIEQAELVKDMLSAQQFLAKYGWTQPVIWDPSSTNENEPLKDFSLMQEGVCNPRQEVAEPTKSPQFIDALKKFQKLNNLPVTGTLDDATINAMNKPRCGVPDNQMAKKETEKPTAAQSLENKTKDSENVTQQNPDPPKIRRKRFLDMLMYSNKYREEQEALQKSTGKVFTKKLLKWRMIGEGYSNQLSINEQRYVFRLAFRMWSEVMPLDFEEDNTSPLSQIDIKLGFGRGRHLGCSRAFDGSGQEFAHAWFLGDIHFDDDEHFTAPSSEHGISLLKVAAHEIGHVLGLSHIHRVGSIMQPNYIPQDSGFELDLSDRRAIQNLYGSCEGPFDTAFDWIYKEKNQYGELVVRYNTYFFRNSWYWMYENRSNRTRYGDPLAIANGWHGIPVQNIDAFVHVWTWTRDASYFFKGTQYWRYDSENDKAYAEDAQGKSYPRLISEGFPGIPSPINAAYFDRRRQYIYFFRDSQVFAFDINRNRVAPDFPKRILDFFPAVAANNHPKGNIDVAYYSYTYSSLFLFKGKEFWKVVSDKDRRQNPSLPYNGLFPRRAISQQWFDICNVHPSLLKI

SEQ ID NO: 153 - protein, 420 aa, Xenopus laevis
  XMMP mature
FLDMLMYSNKYREEQEALQKSTGKVFTKKLLKWRMIGEGYSNQLSINEQRYVFRLAFRMWSEVMPLDFEEDNTSPLSQIDIKLGFGRGRHLGCSRAFDGSGQEFAHAWFLGDIHFDDDEHFTAPSSEHGISLLKVAAHEIGHVLGLSHIHRVGSIMQPNYIPQDSGFELDLSDRRAIQNLYGSCEGPFDTAFDWIYKEKNQYGELVVRYNTYFFRNSWYWMYENRSNRTRYGDPLAIANGWHGIPVQNIDAFVHVWTWTRDASYFFKGTQYWRYDSENDKAYAEDAQGKSYPRLISEGFPGIPSPINAAYFDRRRQYIYFFRDSQVFAFDINRNRVAPDFPKRILDFFPAVAANNHPKGNIDVAYYSYTYSSLFLFKGKEFWKVVSDKDRRQNPSLPYNGLFPRRAISQQWFDICNVHPS

SEQ ID NO: 154 - DNA, 1694 bp, Homo sapiens
  heparanase
gggcaccagccaagatgctgctgcgctcgaagcctgcgctgccgccgccgctgatgctgctgctcctggggccgctgggtcccctctcccctggcgccctgccccgacctgcgcaagcacaggacgtcgtggacctggacttcttcacccaggagccgctgcacctggtgagcccctcgttcctgtccgtcaccattgacgccaacctggccacggacccgcggttcctcatcctcctgggttctccaaagcttcgtaccttggccagaggcttgtctcctgcgtacctgaggtttggtggcaccaagacagacttcctaattttcgatcccaagaaggaatcaacctttgaagagagaagttactggcaatctcaagtcaaccaggatatttgcaaatatggatccatccctcctgatgtggaggagaagttacggttggaatggccctaccaggagcaattgctactccgagaacactaccagaaaaagttcaagaacagcacctactcaagaagctctgtagatgtgctatacacttttgcaaactgctcaggactggacttgatctttggcctaaatgcgttattaagaacagcagatttgcagtggaacagttctaatgctcagttgctcctggactactgctcttccaaggggtataacatttcttgggaactaggcaatgaacctaacagtttccttaagaaggctgatattttcatcaatgggtcgcagttaggagaagattttattcaattgcataaacttctaagaaagtccaccttcaaaaatgcaaaactctatggtcctgatgttggtcagcctcgaagaaagacggctaagatgctgaagagcttcctgaaggctggtggagaagtgattgattcagttacatggcatcactactatttgaatggacggactgctaccagggaagattttctaaaccctgatgtattggacatttttatttcatctgtgcaaaaagttttccaggtggttgagagcaccaggcctggcaagaaggtctggttaggagaaacaagctctgcatatggaggcggagcgcccttgctatccgacacctttgcagctggctttatgtggctggataaattgggcctgtcagcccgaatgggaatagaagtggtgatgaggcaagtattctttggagcaggaaactaccatttagtggatgaaaacttcgatcctttacctgattattggctatctcttctgttcaagaaattggtgggcaccaaggtgttaatggcaagcgtgcaaggttcaaagagaaggaagcttcgagtataccttcattgcacaaacactgacaatccaaggtataaagaaggagatttaactctgtatgccataaacctccataatgtcaccaagtacttgcggttaccctatcctttttctaacaagcaagtggataaataccttctaagacctttgggacctcatggattactttccaaatctgtccaactcaatggtctaactctaaagatggtggatgatcaaaccttgccacctttaatggaaaaacctctccggccaggaagttcactgggcttgccagctttctcatatagtttttttgtgataagaaatgccaaagttgctgcttgcatctgaaaataaaatatactagtcctgacactgaaaaaaaaaaaaaaaaaaaaa

SEQ ID NO: 155 - protein, 543 aa, Homo sapiens
  heparanase precursor
MLLRSKPALPPPLMLLLLGPLGPLSPGALPRPAQAQDVVDLDFFTQEPLHLVSPSFLSVTIDANLATDPRFLILLGSPKLRTLARGLSPAYLRFGGTKTDFLIFDPKKESTFEERSYWQSQVNQDICKYGSIPPDVEEKLRLEWPYQEQLLLREHYQKKFKNSTYSRSSVDVLYTFANCSGLDLIFGLNALLRTADLQWNSSNAQLLLDYCSSKGYNISWELGNEPNSFLKKADIFINGSQLGEDFIQLHKLLRKSTFKNAKLYGPDVGQPRRKTAKMLKSFLKAGGEVIDSVTWHHYYLNGRTATREDFLNPDVLDIFISSVQKVFQVVESTRPGKKVWLGETSSAYGGGAPLLSDTFAAGFMWLDKLGLSARMGIEVVMRQVFFGAGNYHLVDENFDPLPDYWLSLLFKKLVGTKVLMASVQGSKRRKLRVYLHCTNTDNPRYKEGDLTLYAINLHNVTKYLRLPYPFSNKQVDKYLLRPLGPHGLLSKSVQLNGLTLKMVDDQTLPPLMEKPLRPGSSLGLPAFSYSFFVIRNAKVAACI

SEQ ID NO: 156 - protein, 460 aa, Homo sapiens
  heparanase mature
  heparanase 8 kDa subunit
  heparanase 50 kDa subunit
QDVVDLDFFTQEPLHLVSPSFLSVTIDANLATDPRFLILLGSPKLRTLARGLSPAYLRFGGTKTDFLIFDPKKEKKFKNSTYSRSSVDVLYTFANCSGLDLIFGLNALLRTADLQWNSSNAQLLLDYCSSKGYNISWELGNEPNSFLKKADIFINGSQLGEDFIQLHKLLRKSTFKNAKLYGPDVGQPRRKTAKMLKSFLKAGGEVIDSVTWHHYYLNGRTATREDFLNPDVLDIFISSVQKVFQVVESTRPGKKVWLGETSSAYGGGAPLLSDTFAAGFMWLDKLGLSARMGIEVVMRQVFFGAGNYHLVDENFDPLPDYWLSLLFKKLVGTKVLMASVQGSKRRKLRVYLHCTNTDNPRYKEGDLTLYAINLHNVTKYLRLPYPFSNKQVDKYLLRPLGPHGLLSKSVQLNGLTLKMVDDQTLPPLMEKPLRPGSSLGLPAFSYSFFVIRNAKVAACI

SEQ ID NO: 157 - DNA, 4670 bp, Homo sapiens
  ADAMTS-1
gcactcgctggaaagcggctccgagccaggggctattgcaaagccagggtgcgctaccggacggagaggggagagccctgagcagagtgagcaacatcgcagccaaggcggaggccgaagaggggcgccaggcaccaatctccgcgttgcctcagccccggaggcgccccagagcgcttcttgtcccagcagagccactctgcctgcgcctgcctctcagtgtctccaactttgcgctggaagaaaaacttcccgcgcgccggcagaactgcagcgcctccttttagtgactccgggagcttcggctgtagccggctctgcgcgcccttccaacgaataatagaaattgttaattttaacaatccagagcaggccaacgaggctttgctctcccgacccgaactaaaggtccctcgctccgtgcgctgctacgagcggtgtctcctggggctccaatgcagcgagctgtgcccgaggggttcggaaggcgcaagctgggcagcgacatggggaacgcggagcgggctccggggtctcggagctttgggcccgtacccacgctgctgctgctcgccgcggcgctactggccgtgtcggacgcactcgggcgcccctccgaggaggacgaggagctagtggtgccggagctggagcgcgccccgggacacgggaccacgcgcctccgcctgcacgcctttgaccagcagctggatctggagctgcggcccgacagcagctttttggcgcccggcttcacgctccagaacgtggggcgcaaatccgggtccgagacgccgcttccggaaaccgacctggcgcactgcttctactccggcaccgtgaatggcgatcccagctcggctgccgccctcagcctctgcgagggcgtgcgcggcgccttctacctgctgggggaggcgtatttcatccagccgctgcccgccgccagcgagcgcctcgccaccgccgccccaggggagaagccgccggcaccactacagttccacctcctgcggcggaatcggcagggcgacgtcggcggcacgtgcggggtcgtggacgacgagccccggccgactgggaaagcggagaccgaagacgaggacgaagggactgagggcgaggacgaaggggctcagtggtcgccgcaggacccggcactgcaaggcgtaggacagcccacaggaactggaagcataagaaagaagcgatttgtgtccagtcaccgctatgtggaaaccatgcttgtggcagaccagtcgatggcagaattccacggcagtggtctaaagcattaccttctcacgttgttttcggtggcagccagattgtacaaacaccccagcattcgtaattcagttagcctggtggtggtgaagatcttggtcatccacgatgaacagaaggggccggaagtgacctccaatgctgccctcactctgcggaacttttgcaactggcagaagcagcacaacccacccagtgaccgggatgcagagcactatgacacagcaattcttttcaccagacaggacttgtgtgggtcccagacatgtgatactcttgggatggctgatgttggaactgtgtgtgatccgagcagaagctgctccgtcatagaagatgatggtttacaagctgccttcaccacagcccatgaattaggccacgtgtttaacatgccacatgatgatgcaaagcagtgtgccagccttaatggtgtgaaccaggattcccacatgatggcgtcaatgctttccaacctggaccacagccagccttggtctccttgcagtgcctacatgattacatcatttctggataatggtcatggggaatgtttgatggacaagcctcagaatcccatacagctcccaggcgatctccctggcacctcgtacgatgccaaccggcagtgccagtttacatttggggaggactccaaacactgccccgatgcagccagcacatgtagcaccttgtggtgtaccggcacctctggtggggtgctggtgtgtcaaaccaaacacttcccgtgggcggatggcaccagctgtggagaagggaaatggtgtatcaacggcaagtgtgtgaacaaaaccgacagaaagcattttgatacgccttttcatggaagctggggaatgtgggggccttggggagactgttcgagaacgtgcggtggaggagtccagtacacgatgagggaatgtgacaacccagtcccaaagaatggagggaagtactgtgaaggcaaacgagtgcgctacagatcctgtaaccttgaggactgtccagacaataatggaaaaacctttagagaggaacaatgtgaagcacacaacgagttttcaaaagcttcctttgggagtgggcctgcggtggaatggattcccaagtacgctggcgtctcaccaaaggacaggtgcaagctcatctgccaagccaaaggcattggctacttcttcgttttgcagcccaaggttgtagatggtactccatgtagcccagattccacctctgtctgtgtgcaaggacagtgtgtaaaagctggttgtgatcgcatcatagactccaaaaagaagtttgataaatgtggtgtttgcgggggaaatggatctacttgtaaaaaaatatcaggatcagttactagtgcaaaacctggatatcatgatatcatcacaattccaactggagccaccaacatcgaagtgaaacagcggaaccagaggggatccaggaacaatggcagctttcttgccatcaaagctgctgatggcacatatattcttaatggtgactacactttgtccaccttagagcaagacattatgtacaaaggtgttgtcttgaggtacagcggctcctctgcggcattggaaagaattcgcagctttagccctctcaaagagcccttgaccatccaggttcttactgtgggcaatgcccttcgacctaaaattaaatacacctacttcgtaaagaagaagaaggaatctttcaatgctatccccactttttcagcatgggtcattgaagagtggggcgaatgttctaagtcatgtgaattgggttggcagagaagactggtagaatgccgagacattaatggacagcctgcttccgagtgtgcaaaggaagtgaagccagccagcaccagaccttgtgcagaccatccctgcccccagtggcagctgggggagtggtcatcatgttctaagacctgtgggaagggttacaaaaaaagaagcttgaagtgtctgtcccatgatggaggggtgttatctcatgagagctgtgatcctttaaagaaacctaaacatttcatagacttttgcacaatggcagaatgcagttaagtggtttaagtggtgttagctttgagggcaaggcaaagtgaggaagggctggtgcagggaaagcaagaaggctggagggatccagcgtatcttgccagtaaccagtgaggtgtatcagtaaggtgggattatgggggtagatagaaaaggagttgaatcatcagagtaaactgccagttgcaaatttgataggatagttagtgaggattattaacctctgagcagtgatatagcataataaagccccgggcattattattattatttcttttgttacatctattacaagtttagaaaaaacaaagcaattgtcaaaaaaagttagaactattacaacccctgtttcctggtacttatcaaatacttagtatcatgggggttgggaaatgaaaagtaggagaaaagtgagattttactaagacctgttttactttacctcactaacaatggggggagaaaggagtacaaataggatctttgaccagcactgtttatggctgctatggtttcagagaatgtttatacattatttctaccgagaattaaaacttcagattgttcaacatgagagaaaggctcagcaacgtgaaataacgcaaatggcttcctctttccttttttggaccatctcagtctttatttgtgtaattcattttgaggaaaaaacaactccatgtatttattcaagtgcattaaagtctacaatggaaaaaaagcagtgaagcattagatgctggtaaaagctagaggagacacaatgagcttagtacctccaacttcctttctttcctaccatgtaaccctgctttgggaatatggatgtaaagaagtaacttgtgtctcatgaaaatcagtacaatcacacaaggaggatgaaacgccggaacaaaaatgaggtgtgtagaacagggtcccacaggtttggggacattgagatcacttgtcttgtggtggggaggctgctgaggggtagcaggtccatctccagcagctggtccaacagtcgtatcctggtgaatgtctgttcagctcttctgtgagaatatgattttttccatatgtatatagtaaaatatgttactataaattacatgtactttataagtattggtttgggtgttccttccaagaaggactatagttagtaataaatgcctataataacatatttatttttatacatttatttctaatgaaaaaaacttttaaattatatcgcttttgtggaagtgcatataaaatagagtatttatacaatatatgttactagaaataaaagaacacttttggaaaaaaaaaaaaaaaaaaaaa

SEQ ID NO: 158 - protein, 967 aa, Homo sapiens
  ADAMTS- precursor
MQRAVPEGFGRRKLGSDMGNAERAPGSRSFGPVPTLLLLAAALLAVSDALGRPSEEDEELVVPELERAPGHGTTRLRLHAFDQQLDLELRPDSSFLAPGFTLQNVGRKSGSETPLPETDLAHCFYSGTVNGDPSSAAALSLCEGVRGAFYLLGEAYFIQPLPAASERLATAAPGEKPPAPLQFHLLRRNRQGDVGGTCGVVDDEPRPTGKAETEDEDEGTEGEDEGAQWSPQDPALQGVGQPTGTGSIRKKRFVSSHRYVETMLVADQSMAEFHGSGLKHYLLTLFSVAARLYKHPSIRNSVSLVVVKILVIHDEQKGPEVTSNAALTLRNFCNWQKQHNPPSDRDAEHYDTAILFTRQDLCGSQTCDTLGMADVGTVCDPSRSCSVIEDDGLQAAFTTAHELGHVFNMPHDDAKQCASLNGVNQDSHMMASMLSNLDHSQPWSPCSAYMITSFLDNGHGECLMDKPQNPIQLPGDLPGTSYDANRQCQFTFGEDSKHCPDAASTCSTLWCTGTSGGVLVCQTKHFPWADGTSCGEGKWCINGKCVNKTDRKHFDTPFHGSWGMWGPWGDCSRTCGGGVQYTMRECDNPVPKNGGKYCEGKRVRYRSCNLEDCPDNNGKTFREEQCEAHNEFSKASFGSGPAVEWIPKYAGVSPKDRCKLICQAKGIGYFFVLQPKVVDGTPCSPDSTSVCVQGQCVKAGCDRIIDSKKKFDKCGVCGGNGSTCKKISGSVTSAKPGYHDIITIPTGATNIEVKQRNQRGSRNNGSFLAIKAADGTYILNGDYTLSTLEQDIMYKGVVLRYSGSSAALERIRSFSPLKEPLTIQVLTVGNALRPKIKYTYFVKKKKESFNAIPTFSAWVIEEWGECSKSCELGWQRRLVECRDINGQPASECAKEVKPASTRPCADHPCPQWQLGEWSSCSKTCGKGYKKRSLKCLSHDGGVLSHESCDPLKKPKHFIDFCTMAECS

SEQ ID NO: 159 - protein, 715 aa, Homo sapiens
  ADAMTS-1 mature
FVSSHRYVETMLVADQSMAEFHGSGLKHYLLTLFSVAARLYKHPSIRNSVSLVVVKILVIHDEQKGPEVTSNAALTLRNFCNWQKQHNPPSDRDAEHYDTAILFTRQDLCGSQTCDTLGMADVGTVCDPSRSCSVIEDDGLQAAFTTAHELGHVFNMPHDDAKQCASLNGVNQDSHMMASMLSNLDHSQPWSPCSAYMITSFLDNGHGECLMDKPQNPIQLPGDLPGTSYDANRQCQFTFGEDSKHCPDAASTCSTLWCTGTSGGVLVCQTKHFPWADGTSCGEGKWCINGKCVNKTDRKHFDTPFHGSWGMWGPWGDCSRTCGGGVQYTMRECDNPVPKNGGKYCEGKRVRYRSCNLEDCPDNNGKTFREEQCEAHNEFSKASFGSGPAVEWIPKYAGVSPKDRCKLICQAKGIGYFFVLQPKVVDGTPCSPDSTSVCVQGQCVKAGCDRIIDSKKKFDKCGVCGGNGSTCKKISGSVTSAKPGYHDIITIPTGATNIEVKQRNQRGSRNNGSFLAIKAADGTYILNGDYTLSTLEQDIMYKGVVLRYSGSSAALERIRSFSPLKEPLTIQVLTVGNALRPKIKYTYFVKKKKESFNAIPTFSAWVIEEWGECSKSCELGWQRRLVECRDINGQPASECAKEVKPASTRPCADHPCPQWQLGEWSSCSKTCGKGYKKRSLKCLSHDGGVLSHESCDPLKKPKHFIDFCTMAECS

SEQ ID NO: 160 - DNA, 3636 bp, Homo sapiens
  ADAMTS-2
atggatccgccggcgggagccgctcgccgcctgctctgccccgcgctgctgctgctgctgctgctgctgccgccgccgctcctgccgccgccgccgccgcccgcgaacgccaggctcgccgccgccgccgaccccccaggcgggcccctggggcacggagcggagcgcatcctggcggtgcccgtgcgcactgacgcccagggccgcttggtgtcccacgtggtgtcggcagctacgtccagagcaggggtacgagcccgcagggccgccccggtccggaccccgagcttccccggaggcaacgaggaggagcctggcagtcacctcttctacaatgtcacggtctttggccgagacctgcacctgcggctgcggcccaacgcccgcctcgtggcgcccggggccactatggagtggcagggcgagaagggcaccacccgcgtggagcccctgctcgggagctgtctctacgtcggagacgtggccggcctagccgaagcctcctctgtggcgctcagcaactgcgatgggctggctggtctgatccggatggaggaggaggagttcttcatcgaacccttggagaaggggctggcggcgcaggaggctgagcaaggccgtgtgcatgtggtgtatcgccggccacccacgtcccctcctctcggggggccacaggccctggacacaggggcctccctggacagcctggacagcctcagccgcgccctgggcgtcctagaggagcacgccaacagctcgaggcggagggcacgcaggcatgctgcagacgatgactacaacatcgaggtcctgctgggcgtggatgactctgtggtgcagttccacgggaaggagcacgtacagaagtacctgctgacactcatgaacattgtcaatgaaatctaccatgacgagtccttgggtgcccacatcaacgtggtcctggtgcggatcatcctcctgagctatggaaagtccatgagcctcatcgagatcgggaacccctctcagagcctggagaatgtctgccgctgggcctacctccagcagaagccagacacgggccacgatgaataccacgatcacgccatcttcctcacacggcaggactttgggccttccggcatgcaaggctatgctcctgtcaccggcatgtgccatccggtccgcagctgcaccctgaaccatgaggacggcttctcctcagcgtttgtggtggcccatgagactggccacgtgctgggcatggagcacgacgggcagggcaaccgctgtggcgacgaggtgcggctgggcagcatcatggcgcccctggtgcaggccgccttccaccgcttccactggtcccgctgcagccagcaggagctgagccgctacctgcactcctatgactgcctgctggatgaccccttcgcccacgactggccggcgctgccccagctcccgggactgcactactccatgaacgagcaatgccgctttgacttcggcctgggctacatgatgtgcacggcgttccggacctttgacccctgcaagcagctgtggtgcagccatcctgacaacccctacttttgcaagaccaagaaggggccccccttggacgggactatgtgtgcacctggcaagcattgttttaaaggacactgcatctggctgacacctgacatcctcaaacgggacggcagctggggcgcttggagtccgtttggctcctgctcacgtacctgtggcacgggcgtgaagttcaggacccgccagtgtgacaacccacacccggccaacgggggccgcacctgctcgggccttgcctacgacttccagctctgcagccgccaggactgccccgactccctggctgacttccgcgaggagcagtgccgccagtgggacctgtacttcgagcacggcgacgcccagcaccactggctgccccacgagcaccgggatgccaaggagagatgccacctgtactgcgagtccagggagaccggggaggtggtgtccatgaagcgcatggtgcatgatgggacgcgctgctcctacaaggacgccttcagcctctgtgtgcgcggggactgcaggaaggtgggctgtgacggtgtgatcggctccagcaagcaggaagacaagtgtggcgtgtgcggaggggacaacagccactgcaaagtggtcaagggcacgttcacacggtcacccaagaagcatggttacatcaagatgtttgagatccctgcaggagccagacacctgctcattcaggaggtagacgccaccagccaccatctggccgtcaagaacctggagacaggcaagttcatcttaaatgaagagaatgacgtggatgccagttccaaaaccttcattgccatgggcgtggagtgggagtacagagacgaggacggccgggagacgctgcagaccatgggccccctccacggcaccatcaccgttctggtcatcccggtgggagacacccgggtctcactgacgtacaaatacatgatccatgaggactcactgaatgtcgatgacaacaacgtcctggaagaggactctgtggtctacgagtgggccctgaagaagtggtctccgtgctccaagccctgtggcggagggtcccagttcaccaagtatggctgccgccggaggctggaccacaagatggtacaccgtggcttctgtgccgccctctcgaagcccaaagccatccgcagagcgtgcaacccacaggaatgctcccagccagtgtgggtcacaggcgaatgggagccatgtagccagacctgtgggcggacaggcatgcaggtgcgctccgtgcgctgcattcagccgctacacgacaacaccacccgctccgtgcacgccaagcactgcaatgacgcccggcccgagagccgccgggcctgcagccgcgagctctgccctggtcgttggcgagccgggccctggtcccagtgctcagtaacctgtggcaacggcacccaggagcggccagtgccctgccgcaccgcggacgacagcttcggcatctgccaggaggagcgtcctgagacagcgaggacctgcaggcttggcccctgtccccgaaacatctcagatccctccaagaagagctacgtagttcagtggctgtcccgcccggaccccgactcgcccatccggaagatctcgtcaaagggccactgccaaggcgacaagtcaatattctgtaggatggaagtcttgtcccgctattgctccatcccaggctacaacaagctgtcctgcaagtcctgtaacctgtacaacaacctcaccaacgtggagggcaggatagagccaccgcctgggaagcacaacgacattgacgtgttcatgcctaccctcccagtgcccactgtagccatggaggtgcggccatcaccaagcacccccctggaggtccctctcaatgcctccagcaccaatgccacagaggatcacccagaaaccaatgccgtagatgaaccctacaaaatccatggcctggaagatgaagtccagccacccaacctaatccctcgacgaccgagcccctatgaaaagaccagaaaccaaagaatccaagagctcattgatgagatgcggaagaaagagatgctcggaaagttctaa

SEQ ID NO: 161 - protein, 1211 aa, Homo sapiens
  ADAMTS-2 precursor
MDPPAGAARRLLCPALLLLLLLLPPPLLPPPPPPANARLAAAADPPGGPLGHGAERILAVPVRTDAQGRLVSHVVSAATSRAGVRARRAAPVRTPSFPGGNEEEPGSHLFYNVTVFGRDLHLRLRPNARLVAPGATMEWQGEKGTTRVEPLLGSCLYVGDVAGLAEASSVALSNCDGLAGLIRMEEEEFFIEPLEKGLAAQEAEQGRVHVVYRRPPTSPPLGGPQALDTGASLDSLDSLSRALGVLEEHANSSRRRARRHAADDDYNIEVLLGVDDSVVQFHGKEHVQKYLLTLMNIVNEIYHDESLGAHINVVLVRIILLSYGKSMSLIEIGNPSQSLENVCRWAYLQQKPDTGHDEYHDHAIFLTRQDFGPSGMQGYAPVTGMCHPVRSCTLNHEDGFSSAFVVAHETGHVLGMEHDGQGNRCGDEVRLGSIMAPLVQAAFHRFHWSRCSQQELSRYLHSYDCLLDDPFAHDWPALPQLPGLHYSMNEQCRFDFGLGYMMCTAFRTFDPCKQLWCSHPDNPYFCKTKKGPPLDGTMCAPGKHCFKGHCIWLTPDILKRDGSWGAWSPFGSCSRTCGTGVKFRTRQCDNPHPANGGRTCSGLAYDFQLCSRQDCPDSLADFREEQCRQWDLYFEHGDAQHHWLPHEHRDAKERCHLYCESRETGEVVSMKRMVHDGTRCSYKDAFSLCVRGDCRKVGCDGVIGSSKQEDKCGVCGGDNSHCKVVKGTFTRSPKKHGYIKMFEIPAGARHLLIQEVDATSHHLAVKNLETGKFILNEENDVDASSKTFIAMGVEWEYRDEDGRETLQTMGPLHGTITVLVIPVGDTRVSLTYKYMIHEDSLNVDDNNVLEEDSVVYEWALKKWSPCSKPCGGGSQFTKYGCRRRLDHKMVHRGFCAALSKPKAIRRACNPQECSQPVWVTGEWEPCSQTCGRTGMQVRSVRCIQPLHDNTTRSVHAKHCNDARPESRRACSRELCPGRWRAGPWSQCSVTCGNGTQERPVPCRTADDSFGICQEERPETARTCRLGPCPRNISDPSKKSYVVQWLSRPDPDSPIRKISSKGHCQGDKSIFCRMEVLSRYCSIPGYNKLSCKSCNLYNNLTNVEGRIEPPPGKHNDIDVFMPTLPVPTVAMEVRPSPSTPLEVPLNASSTNATEDHPETNAVDEPYKIHGLEDEVQPPNLIPRRPSPYEKTRNQRIQELIDEMRKKEMLGKF

SEQ ID NO: 162 - protein, 958 aa, Homo sapiens
  ADAMTS-2 mature
RRRARRHAADDDYNIEVLLGVDDSVVQFHGKEHVQKYLLTLMNIVNEIYHDESLGAHINVVLVRIILLSYGKSMSLIEIGNPSQSLENVCRWAYLQQKPDTGHDEYHDHAIFLTRQDFGPSGMQGYAPVTGMCHPVRSCTLNHEDGFSSAFVVAHETGHVLGMEHDGQGNRCGDEVRLGSIMAPLVQAAFHRFHWSRCSQQELSRYLHSYDCLLDDPFAHDWPALPQLPGLHYSMNEQCRFDFGLGYMMCTAFRTFDPCKQLWCSHPDNPYFCKTKKGPPLDGTMCAPGKHCFKGHCIWLTPDILKRDGSWGAWSPFGSCSRTCGTGVKFRTRQCDNPHPANGGRTCSGLAYDFQLCSRQDCPDSLADFREEQCRQWDLYFEHGDAQHHWLPHEHRDAKERCHLYCESRETGEVVSMKRMVHDGTRCSYKDAFSLCVRGDCRKVGCDGVIGSSKQEDKCGVCGGDNSHCKVVKGTFTRSPKKHGYIKMFEIPAGARHLLIQEVDATSHHLAVKNLETGKFILNEENDVDASSKTFIAMGVEWEYRDEDGRETLQTMGPLHGTITVLVIPVGDTRVSLTYKYMIHEDSLNVDDNNVLEEDSVVYEWALKKWSPCSKPCGGGSQFTKYGCRRRLDHKMVHRGFCAALSKPKAIRRACNPQECSQPVWVTGEWEPCSQTCGRTGMQVRSVRCIQPLHDNTTRSVHAKHCNDARPESRRACSRELCPGRWRAGPWSQCSVTCGNGTQERPVPCRTADDSFGICQEERPETARTCRLGPCPRNISDPSKKSYVVQWLSRPDPDSPIRKISSKGHCQGDKSIFCRMEVLSRYCSIPGYNKLSCKSCNLYNNLTNVEGRIEPPPGKHNDIDVFMPTLPVPTVAMEVRPSPSTPLEVPLNASSTNATEDHPETNAVDEPYKIHGLEDEVQPPNLIPRRPSPYEKTRNQRIQELIDEMRKKEMLGKF

SEQ ID NO: 163 - DNA, 5821 bp, Homo sapiens
  ADAMTS-3
gctttgcccagtagttggaaagtgaactcgactcgtgatggttctcctgtcactttggttgatagcagccgctctggtagaggttaggacttcagctgatggacaagctggtaatgaagaaatggtgcaaatagatttaccaataaagagatatagagagtatgagctggtgactccagtcagcacaaatctagaaggacgctatctctcccatactctttctgcgagtcacaaaaagaggtcagcgagggacgtgtcttccaaccctgagcagttgttctttaacatcacggcatttggaaaagattttcatctgcgactaaagcccaacactcaactagtagctcctggggctgttgtggagtggcatgagacatctctggtgcctgggaatataaccgatcccattaacaaccatcaaccaggaagtgctacgtatagaatccggaaaacagagcctttgcagactaactgtgcttatgttggtgacatcgtggacattccaggaacctctgttgccatcagcaactgtgatggtctggctggaatgataaaaagtgataatgaagagtatttcattgaacccttggaaagaggtaaacagatggaggaagaaaaaggaaggattcatgttgtctacaagagatcagctgtagaacaggctcccatagacatgtccaaagacttccactacagagagtcggacctggaaggccttgatgatctaggtactgtttatggcaacatccaccagcagctgaatgaaacaatgagacgccgcagacacgcgggagaaaacgattacaatatcgaggtactgctgggagtggatgactctgtggtccgtttccatggcaaagagcacgtccaaaactacctcctgaccctaatgaacattgtgaatgaaatttaccatgatgagtccctcggagtgcatataaatgtggtcctggtgcgcatgataatgctgggatatgcaaagtccatcagcctcatagaaaggggaaacccatccagaagcttggagaatgtgtgtcgctgggcgtcccaacagcaaagatctgatctcaaccactctgaacaccatgaccatgcaatttttttaaccaggcaagactttggacctgctggaatgcaaggatatgctccagtcaccggcatgtgtcatccagtgagaagttgtaccctgaatcatgaggatggtttttcatctgcttttgtagtagcccatgaaacgggccatgtgttgggaatggagcatgatggacaaggcaacaggtgtggtgatgagactgctatgggaagtgtcatggctcccttggtacaagcagcattccatcgttaccactggtcccgatgcagtggtcaagaactgaaaagatatatccattcctatgactgtctccttgatgacccttttgatcatgattggcctaaactcccagaacttcctggaatcaattattctatggatgagcaatgtcgttttgattttggtgttggctataaaatgtgcaccgcgttccgaacctttgacccatgtaaacagctgtggtgtagccatcctgataatccctacttttgtaagactaaaaagggacctccacttgatgggactgaatgtgctgctggaaaatggtgctataagggtcattgcatgtggaagaatgctaatcagcaaaaacaagatggcaattgggggtcatggactaaatttggctcctgttctcggacatgtggaactggtgttcgtttcagaacacgccagtgcaataatcccatgcccatcaatggtggtcaggattgtcctggtgttaattttgagtaccagctttgtaacacagaagaatgccaaaaacactttgaggacttcagagcacagcagtgtcagcagcgaaactcccactttgaataccagaataccaaacaccactggttgccatatgaacatcctgaccccaagaaaagatgccacctttactgtcagtccaaggagactggagatgttgcttacatgaaacaactggtgcatgatggaacgcactgttcttacaaagatccatatagcatatgtgtgcgaggagagtgtgtgaaagtgggctgtgataaagaaattggttctaataaggttgaggataagtgtggtgtctgtggaggagataattcccactgccgaaccgtgaaggggacatttaccagaactcccaggaagcttgggtaccttaagatgtttgatataccccctggggctagacatgtgttaatccaagaagacgaggcttctcctcatattcttgctattaagaaccaggctacaggccattatattttaaatggcaaaggggaggaagccaagtcgcggaccttcatagatcttggtgtggagtgggattataacattgaagatgacattgaaagtcttcacaccgatggacctttacatgatcctgttattgttttgattatacctcaagaaaatgatacccgctctagcctgacatataagtacatcatccatgaagactctgtacctacaatcaacagcaacaatgtcatccaggaagaattagatacttttgagtgggctttgaagagctggtctcagtgttccaaaccctgtggtggaggtttccagtacactaaatatggatgccgtaggaaaagtgataataaaatggtccatcgcagcttctgtgaggccaacaaaaagccgaaacctattagacgaatgtgcaatattcaagagtgtacacatccactctgggtagcagaagaatgggaacactgcaccaaaacctgtggaagttctggctatcagcttcgcactgtacgctgccttcagccactccttgatggcaccaaccgctctgtgcacagcaaatactgcatgggtgaccgtcccgagagccgccggccctgtaacagagtgccctgccctgcacagtggaaaacaggaccctggagtgagtgttcagtgacctgcggtgaaggaacggaggtgaggcaggtcctctgcagggctggggaccactgtgatggtgaaaagcctgagtcggtcagagcctgtcaactgcctccttgtaatgatgaaccatgtttgggagacaagtccatattctgtcaaatggaagtgttggcacgatactgctccataccaggttataacaagttatgttgtgagtcctgcagcaagcgcagtagcaccctgccaccaccataccttctagaagctgctgaaactcatgatgatgtcatctctaaccctagtgacctccctagatctctagtgatgcctacatctttggttccttatcattcagagacccctgcaaagaagatgtctttgagtagcatctcttcagtgggaggtccaaatgcatatgctgctttcaggccaaacagtaaacctgatggtgctaatttacgccagaggagtgctcagcaagcaggaagtaagactgtgagactggtcaccgtaccatcctccccacccaccaagagggtccacctcagttcagcttcacaaatggctgctgcttccttctttgcagccagtgattcaataggtgcttcttctcaggcaagaacctcaaagaaagatggaaagatcattgacaacagacgtccgacaagatcatccaccttagaaagatgagaaagtgaaccaaaaaggctagaaaccagaggaaaacctggacaacctctctcttcccatggtgcatatgcttgtttaaagtggaaatctctatagatcgtcagctcattttatctgtaattggaagaacagaaagtgctggctcactttctagttgctttcatcctccttttgttctgcattgactcatttaccagaattcattggaagaaatcaccaaagattattacaaaagaaaaatatgttgctaagattgtgttggtcgctctctgaagcagaaaagggactggaaccaattgtgcatatcagctgactttttgtttgttttagaaaagttacagtaaaaattaaaaagagataccaatggtttacactttaacaagaaattttggatatggaacaaagaattcttagacttgtattcctatttatctatattagaaatattgtatgagcaaatttgcagctgttgtgtaaatactgtatattgcaaaaatcagtattattttaagagatgtgttctcaaatgattgtttactatattacatttctggatgttctaggtgcctgtcgttgagtattgccttgtttgacattctataggttaattttcaaagcagagtattacaaaagagaagttagaattacagctactgacaatataaagggttttgttgaatcaacaatgtgatacgtaaattatagaaaaagaaaagaaacacaaaagctatagatatacagatatcagcttacctattgccttctatacttataatttaaaggattggtgtcttagtacacttgtggtcacagggatcaacgaatagtaaataatgaactcgtgcaagacaaaactgaaaccctctttccaggacctcagtaggcaccgttgaggtgtcctttgtttttgtgtgtgtgtgttcttttttaattttcgcattgttgacagatacaaacagttatactcaatgtactgtaataatcgcaaaggaaaaagttttgggataacttatttgtatgttggtagctgagaaaaatatcatcagtctagaattgatatttgagtatagtagagctttggggctttgaaggcaggttcaagaaagcatatgtcgatggttgagatatttattttccatatggttcatgttcaaatgttcacaaccacaatgcatctgactgcaataatgtgctaataatttatgtcagtagtcaccttgctcacagcaaagccagaaatgctctctccagggagtagatgtaaagtacttgtacatagaattcagaactgaagatatttattaaaagttgattttttttcttgatagtatttttatgtactaaatatttacactaatatcaattacatattttggtaaactagagagacataattagagatgcatgctttgttctgtgcatagagacctttaagcaaactactacagccaactcaaaagctaaaactgaacaaatttgatgttatgcaaacatcttgcatttttagtagttgatattaagttgatgacttgtttcccttcaaggaaacattaaattgtatggactcagctagctgttcaatgaaattgtgaattagaaacatttttaaaagtttttgaaagagataagtgcatcatgaattacatgtacatgagaggagatagtgatatcagcataatgattttgaggtcagtacctgagctgtctaaaaatatattatacaaactaaaatgtagatgaattaacctctcaaagcacagaatgtgcaagaacttttgcattttaatcgttgtaaactaacagcttaaactattgactctatacctctaaagaattgctgctactttgtgcaagaactttgaaggtcaaattaggcaaattccagatagtaaaacaatccctaagccttaagtcttttttttttcctaaaaattcccatagaataaaattctctctagtttacttgtgtgtgcatacatctcatccacaggggaagataaagatggtcacacaaacagtttccataaagatgtacatattcattatacttctgacctttgggctttcttttctactaagctaaaaattcctttttatcaaagtgtacactactgatgctgtttgttgtactgagagcacgtaccaataaaaatgttaacaaaatat

SEQ ID NO: 164 - protein, 1205 aa, Homo sapiens
  ADAMTS-3 precursor
MVLLSLWLIAAALVEVRTSADGQAGNEEMVQIDLPIKRYREYELVTPVSTNLEGRYLSHTLSASHKKRSARDVSSNPEQLFFNITAFGKDFHLRLKPNTQLVAPGAVVEWHETSLVPGNITDPINNHQPGSATYRIRKTEPLQTNCAYVGDIVDIPGTSVAISNCDGLAGMIKSDNEEYFIEPLERGKQMEEEKGRIHVVYKRSAVEQAPIDMSKDFHYRESDLEGLDDLGTVYGNIHQQLNETMRRRRHAGENDYNIEVLLGVDDSVVRFHGKEHVQNYLLTLMNIVNEIYHDESLGVHINVVLVRMIMLGYAKSISLIERGNPSRSLENVCRWASQQQRSDLNHSEHHDHAIFLTRQDFGPAGMQGYAPVTGMCHPVRSCTLNHEDGFSSAFVVAHETGHVLGMEHDGQGNRCGDETAMGSVMAPLVQAAFHRYHWSRCSGQELKRYIHSYDCLLDDPFDHDWPKLPELPGINYSMDEQCRFDFGVGYKMCTAFRTFDPCKQLWCSHPDNPYFCKTKKGPPLDGTECAAGKWCYKGHCMWKNANQQKQDGNWGSWTKFGSCSRTCGTGVRFRTRQCNNPMPINGGQDCPGVNFEYQLCNTEECQKHFEDFRAQQCQQRNSHFEYQNTKHHWLPYEHPDPKKRCHLYCQSKETGDVAYMKQLVHDGTHCSYKDPYSICVRGECVKVGCDKEIGSNKVEDKCGVCGGDNSHCRTVKGTFTRTPRKLGYLKMFDIPPGARHVLIQEDEASPHILAIKNQATGHYILNGKGEEAKSRTFIDLGVEWDYNIEDDIESLHTDGPLHDPVIVLIIPQENDTRSSLTYKYIIHEDSVPTINSNNVIQEELDTFEWALKSWSQVSKPCGGGFQYTKYGCRRKSDNKMVHRSFCEANKKPKPIRRMCNIQECTHPLWVAEEWEHCTKTCGSSGYQLRTVRCLQPLLDGTNRSVHSKYCMGDRPESRRPCNRVPCPAQWKTGPWSECSVTCGEGTEVRQVLCRAGDHCDGEKPESVRACQLPPCNDEPCLGDKSIFCQMEVLARYCSIPGYNKLCCESCSKRSSTLPPPYLLEAAETHDDVISNPSDLPRSLVMPTSLVPYHSETPAKKMSLSSISSVGGPNAYAAFRPNSKPDGANLRQRSAQQAGSKTVRLVTVPSSPPTKRVHLSSASQMAAASFFAASDSIGASSQARTSKKDGKIIDNRRPTRSSTLER

SEQ ID NO: 165 - DNA, 4342 bp, Homo sapiens
  ADAMTS-4
gggagaacccacagggagacccacagacacatatgcacgagagagacagaggaggaaagagacagagacaaaggcacagcggaagaaggcagagacagggcaggcacagaagcggcccagacagagtcctacagagggagaggccagagaagctgcagaagacacaggcagggagagacaaagatccaggaaaggagggctcaggaggagagtttggagaagccagacccctgggcacctctcccaagcccaaggactaagttttctccatttcctttaacggtcctcagcccttctgaaaactttgcctctgaccttggcaggagtccaagcccccaggctacagagaggagctttccaaagctagggtgtggaggacttggtgccctagacggcctcagtccctcccagctgcagtaccagtgccatgtcccagacaggctcgcatcccgggaggggcttggcagggcgctggctgtggggagcccaaccctgcctcctgctccccattgtgccgctctcctggctggtgtggctgcttctgctactgctggcctctctcctgccctcagcccggctggccagccccctcccccgggaggaggagatcgtgtttccagagaagctcaacggcagcgtcctgcctggctcgggcgcccctgccaggctgttgtgccgcttgcaggcctttggggagacgctgctactagagctggagcaggactccggtgtgcaggtcgaggggctgacagtgcagtacctgggccaggcgcctgagctgctgggtggagcagagcctggcacctacctgactggcaccatcaatggagatccggagtcggtggcatctctgcactgggatgggggagccctgttaggcgtgttacaatatcggggggctgaactccacctccagcccctggagggaggcacccctaactctgctgggggacctggggctcacatcctacgccggaagagtcctgccagcggtcaaggtcccatgtgcaacgtcaaggctcctcttggaagccccagccccagaccccgaagagccaagcgctttgcttcactgagtagatttgtggagacactggtggtggcagatgacaagatggccgcattccacggtgcggggctaaagcgctacctgctaacagtgatggcagcagcagccaaggccttcaagcacccaagcatccgcaatcctgtcagcttggtggtgactcggctagtgatcctggggtcaggcgaggaggggccccaagtggggcccagtgctgcccagaccctgcgcagcttctgtgcctggcagcggggcctcaacacccctgaggactcggaccctgaccactttgacacagccattctgtttacccgtcaggacctgtgtggagtctccacttgcgacacgctgggtatggctgatgtgggcaccgtctgtgacccggctcggagctgtgccattgtggaggatgatgggctccagtcagccttcactgctgctcatgaactgggtcatgtcttcaacatgctccatgacaactccaagccatgcatcagtttgaatgggcctttgagcacctctcgccatgtcatggcccctgtgatggctcatgtggatcctgaggagccctggtccccctgcagtgcccgcttcatcactgacttcctggacaatggctatgggcactgtctcttagacaaaccagaggctccattgcatctgcctgtgactttccctggcaaggactatgatgctgaccgccagtgccagctgaccttcgggcccgactcacgccattgtccacagctgccgccgccctgtgctgccctctggtgctctggccacctcaatggccatgccatgtgccagaccaaacactcgccctgggccgatggcacaccctgcgggcccgcacaggcctgcatgggtggtcgctgcctccacatggaccagctccaggacttcaatattccacaggctggtggctggggtccttggggaccatggggtgactgctctcggacctgtgggggtggtgtccagttctcctcccgagactgcacgaggcctgtcccccggaatggtggcaagtactgtgagggccgccgtacccgcttccgctcctgcaacactgaggactgcccaactggctcagccctgaccttccgcgaggagcagtgtgctgcctacaaccaccgcaccgacctcttcaagagcttcccagggcccatggactgggttcctcgctacacaggcgtggccccccaggaccagtgcaaactcacctgccaggcccgggcactgggctactactatgtgctggagccacgggtggtagatgggaccccctgttccccggacagctcctcggtctgtgtccagggccgatgcatccatgctggctgtgatcgcatcattggctccaagaagaagtttgacaagtgcatggtgtgcggaggggacggttctggttgcagcaagcagtcaggctccttcaggaaattcaggtacggatacaacaatgtggtcactatccccgcgggggccacccacattcttgtccggcagcagggaaaccctggccaccggagcatctacttggccctgaagctgccagatggctcctatgccctcaatggtgaatacacgctgatgccctcccccacagatgtggtactgcctggggcagtcagcttgcgctacagcggggccactgcagcctcagagacactgtcaggccatgggccactggcccagcctttgacactgcaagtcctagtggctggcaacccccaggacacacgcctccgatacagcttcttcgtgccccggccgaccccttcaacgccacgccccactccccaggactggctgcaccgaagagcacagattctggagatccttcggcggcgcccctgggcgggcaggaaataacctcactatcccggctgccctttctgggcaccggggcctcggacttagctgggagaaagagagagcttctgttgctgcctcatgctaagactcagtggggaggggctgtgggcgtgagacctgcccctcctctctgccctaatgcgcaggctggccctgccctggtttcctgccctgggaggcagtgatgggttagtggatggaaggggctgacagacagccctccatctaaactgccccctctgccctgcgggtcacaggagggagggggaaggcagggagggcctgggccccagttgtatttatttagtatttattcacttttatttagcaccagggaaggggacaaggactagggtcctggggaacctgacccctgacccctcatagccctcaccctggggctaggaaatccagggtggtggtgataggtataagtggtgtgtgtatgcgtgtgtgtgtgtgtgaaaatgtgtgtgtgcttatgtatgaggtacaacctgttctgctttcctcttcctgaattttattttttgggaaaagaaaagtcaagggtagggtgggccttcagggagtgagggattatctttttttttttttctttctttctttcttttttttttttgagacagaatctcgctctgtcgcccaggctggagtgcaatggcacaatctcggctcactgcatcctccgcctcccgggttcaagtgattctcatgcctcagcctcctgagtagctgggattacaggctcctgccaccacgcccggctaatttttgttttgttttgtttggagacagagtctcgctattgtcaccagggctggaatgatttcagctcactgcaaccttcgccacctgggttccagcaattctcctgcctcagcctcccgagtagctgagattataggcacctaccaccacgcccggctaatttttgtatttttagtagagacggggtttcaccatgttggccaggctggtctcgaactcctgaccttaggtgatccactcgccttcatctcccaaagtgctgggattacaggcgtgagccaccgtgcctggccacgcccaactaatttttgtatttttagtagagacagggtttcaccatgttggccaggctgctcttgaactcctgacctcaggtaatcgacctgcctcggcctcccaaagtgctgggattacaggtgtgagccaccacgcccggtacatattttttaaattgaattctactatttatgtgatccttttggagtcagacagatgtggttgcatcctaactccatgtctctgagcattagatttctcatttgccaataataatacctcccttagaagtttgttgtgaggattaaataatgtaaataaagaactagcataacactcaaaaaaaaaaaa

SEQ ID NO: 166 - DNA, 4342 bp, Homo sapiens; identical to SEQ ID NO: 165
  ADAMTS-4

SEQ ID NO: 167 - protein, 837 aa, Homo sapiens
  ADAMTS-4  precursor
MSQTGSHPGRGLAGRWLWGAQPCLLLPIVPLSWLVWLLLLLLASLLPSARLASPLPREEEIVFPEKLNGSVLPGSGAPARLLCRLQAFGETLLLELEQDSGVQVEGLTVQYLGQAPELLGGAEPGTYLTGTINGDPESVASLHWDGGALLGVLQYRGAELHLQPLEGGTPNSAGGPGAHILRRKSPASGQGPMCNVKAPLGSPSPRPRRAKRFASLSRFVETLVVADDKMAAFHGAGLKRYLLTVMAAAAKAFKHPSIRNPVSLVVTRLVILGSGEEGPQVGPSAAQTLRSFCAWQRGLNTPEDSDPDHFDTAILFTRQDLCGVSTCDTLGMADVGTVCDPARSCAIVEDDGLQSAFTAAHELGHVFNMLHDNSKPCISLNGPLSTSRHVMAPVMAHVDPEEPWSPCSARFITDFLDNGYGHCLLDKPEAPLHLPVTFPGKDYDADRQCQLTFGPDSRHCPQLPPPCAALWCSGHLNGHAMCQTKHSPWADGTPCGPAQACMGGRCLHMDQLQDFNIPQAGGWGPWGPWGDCSRTCGGGVQFSSRDCTRPVPRNGGKYCEGRRTRFRSCNTEDCPTGSALTFREEQCAAYNHRTDLFKSFPGPMDWVPRYTGVAPQDQCKLTCQARALGYYYVLEPRVVDGTPCSPDSSSVCVQGRCIHAGCDRIIGSKKKFDKCMVCGGDGSGCSKQSGSFRKFRYGYNNVVTIPAGATHILVRQQGNPGHRSIYLALKLPDGSYALNGEYTLMPSPTDVVLPGAVSLRYSGATAASETLSGHGPLAQPLTLQVLVAGNPQDTRLRYSFFVPRPTPSTPRPTPQDWLHRRAQILEILRRRPWAGRK

SEQ ID NO: 168 - protein, 625 aa, Homo sapiens
  ADAMTS-4  mature
FASLSRFVETLVVADDKMAAFHGAGLKRYLLTVMAAAAKAFKHPSIRNPVSLVVTRLVILGSGEEGPQVGPSAAQTLRSFCAWQRGLNTPEDSDPDHFDTAILFTRQDLCGVSTCDTLGMADVGTVCDPARSCAIVEDDGLQSAFTAAHELGHVFNMLHDNSKPCISLNGPLSTSRHVMAPVMAHVDPEEPWSPCSARFITDFLDNGYGHCLLDKPEAPLHLPVTFPGKDYDADRQCQLTFGPDSRHCPQLPPPCAALWCSGHLNGHAMCQTKHSPWADGTPCGPAQACMGGRCLHMDQLQDFNIPQAGGWGPWGPWGDCSRTCGGGVQFSSRDCTRPVPRNGGKYCEGRRTRFRSCNTEDCPTGSALTFREEQCAAYNHRTDLFKSFPGPMDWVPRYTGVAPQDQCKLTCQARALGYYYVLEPRVVDGTPCSPDSSSVCVQGRCIHAGCDRIIGSKKKFDKCMVCGGDGSGCSKQSGSFRKFRYGYNNVVTIPAGATHILVRQQGNPGHRSIYLALKLPDGSYALNGEYTLMPSPTDVVLPGAVSLRYSGATAASETLSGHGPLAQPLTLQVLVAGNPQDTRLRYSFFVPRPTPSTPRPTPQDWLHRRAQILEILRRRPWAGRK

SEQ ID NO: 169 - DNA, 9046 bp, Homo sapiens
  ADAMTS-5
cttgactcaatcctgcaagcaagtgtgtgtgtgtccccatcccccgccccgttaacttcatagcaaataacaaatacccataaagtcccagtcgcgcagcccctccccgcgggcagcgcactatgctgctcgggtgggcgtccctgctgctgtgcgcgttccgcctgcccctggccgcggtcggccccgccgcgacacctgcccaggataaagccgggcagcctccgactgctgcagcagccgcccagccccgccggcggcagggggaggaggtgcaggagcgagccgagcctcccggccacccgcaccccctggcgcagcggcgcaggagcaaggggctggtgcagaacatcgaccaactctactccggcggcggcaaggtgggctacctcgtctacgcgggcggccggaggttcctcttggacctggagcgagatggttcggtgggcattgctggcttcgtgcccgcaggaggcgggacgagtgcgccctggcgccaccggagccactgcttctatcggggcacagtggacgctagtccccgctctctggctgtctttgacctctgtgggggtctcgacggcttcttcgcggtcaagcacgcgcgctacaccctaaagccactgctgcgcggaccctgggcggaggaagaaaaggggcgcgtgtacggggatgggtccgcacggatcctgcacgtctacacccgcgagggcttcagcttcgaggccctgccgccgcgcgccagctgcgaaacccccgcgtccacaccggaggcccacgagcatgctccggcgcacagcaacccgagcggacgcgcagcactggcctcgcagctcttggaccagtccgctctctcgcccgctgggggctcaggaccgcagacgtggtggcggcggcggcgccgctccatctcccgggcccgccaggtggagctgcttctggtggctgacgcgtccatggcgcggttgtatggccggggcctgcagcattacctgctgaccctggcctccatcgccaataggctgtacagccatgctagcatcgagaaccacatccgcctggccgtggtgaaggtggtggtgctaggcgacaaggacaagagcctggaagtgagcaagaacgctgccaccacactcaagaacttttgcaagtggcagcaccaacacaaccagctgggagatgaccatgaggagcactacgatgcagctatcctgtttactcgggaggatttatgtgggcatcattcatgtgacaccctgggaatggcagacgttgggaccatatgttctccagagcgcagctgtgctgtgattgaagacgatggcctccacgcagccttcactgtggctcacgaaatcggacatttacttggcctctcccatgacgattccaaattctgtgaagagacctttggttccacagaagataagcgcttaatgtcttccatccttaccagcattgatgcatctaagccctggtccaaatgcacttcagccaccatcacagaattcctggatgatggccatggtaactgtttgctggacctaccacgaaagcagatcctgggccccgaagaactcccaggacagacctacgatgccacccagcagtgcaacctgacattcgggcctgagtactccgtgtgtcccggcatggatgtctgtgctcgcctgtggtgtgctgtggtacgccagggccagatggtctgtctgaccaagaagctgcctgcggtggaagggacgccttgtggaaaggggagaatctgcctgcagggcaaatgtgtggacaaaaccaagaaaaaatattattcaacgtcaagccatggcaactggggatcttggggatcctggggccagtgttctcgctcatgtggaggaggagtgcagtttgcctatcgtcactgtaataaccctgctcccagaaacaacggacgctactgcacagggaagagggccatctaccgctcctgcagtctcatgccctgcccacccaatggtaaatcatttcgtcatgaacagtgtgaggccaaaaatggctatcagtctgatgcaaaaggagtcaaaacttttgtggaatgggttcccaaatatgcaggtgtcctgccagcggatgtgtgcaagctgacctgcagagccaagggcactggctactatgtggtattttctccaaaggtgaccgatggcactgaatgtaggccgtacagtaattccgtctgcgtccgggggaagtgtgtgagaactggctgtgacggcatcattggctcaaagctgcagtatgacaagtgcggagtatgtggaggagacaactccagctgtacaaagattgttggaacctttaataagaaaagtaagggttacactgacgtggtgaggattcctgaaggggcaacccacataaaagttcgacagttcaaagccaaagaccagactagattcactgcctatttagccctgaaaaagaaaaacggtgagtaccttatcaatggaaagtacatgatctccacttcagagactatcattgacatcaatggaacagtcatgaactatagcggttggagccacagggatgacttcctgcatggcatgggctactctgccacgaaggaaattctaatagtgcagattcttgcaacagaccccactaaaccattagatgtccgttatagcttttttgttcccaagaagtccactccaaaagtaaactctgtcactagtcatggcagcaataaagtgggatcacacacttcgcagccgcagtgggtcacgggcccatggctcgcctgctctaggacctgtgacacaggttggcacaccagaacggtgcagtgccaggatggaaaccggaagttagcaaaaggatgtcctctctcccaaaggccttctgcgtttaagcaatgcttgttgaagaaatgttagcctgtggttatgatcttatgcacaaagataactggaggattcagcactgatgcagtcgtggtgaacaggaggtctacctaacgcacagaaagtcatgcttcagtgacattgtcaacaggagtccaattatgggcagaatctgctctctgtgaccaaaagaggatgtgcactgcttcacgtgacagtggtgaccttgcaatatagaaaaacttgggagttattgaacatcccctgggcttacaagaaacactgatgaatgtaaaatcaggggacatttgaagatggcagaactgtctcccccttgtcacctacctctgatagaatgtctttaatggtatcataatcattttcacccataatacacagtagcttcttcttactgtttgtaaatacattctcccttggtatgtcactttatatcccctggttctattaaaatatccatatatatttctataaaaaaagtgtttgaccaaagtaggtctgcagctatttcaacttccttccgtttccagaaagagctgtggatattttactggaaattaagaacttgctgctgttttaataagatgtagtatattttctgactacaggagataaaatttcagtcaaaaaaccattttgacagcaagtatcttctgagaaattttgaaaagtaaatagatctcagtgtatctagtcacttaaatacatacacgggttcatttacttaaacctttgactgcctgtatttttttcaggtagctagccaaattaatgcataatttcagatgtagaagtagggtttgcgtgtgtgtgtgtgatcatactcaagagtctaaaaactagtttccttgtgttggaaatttaaaaggaaaaaaatcgtatttcactgtgttttcaatttatattttcacaactactttctctctccagagctttcatctgatatctcacaatgtatgatatacgtacaaaacacacagcaagttttctatcatgtccaacacattcaacactggtatacctcctaccagcaagcctttaaaatgcatttgtgtttgcttatttgttttgttcaagggttcagtaagacctacaatgttttgtatttcttgacttattttattagaaacattaaagatcacttggtagttagccacattgagaagtggttatcattgttaatgtggttaatgccaaaaagtggttaatattaataagactgtttccacaccataggcaataatttcttaatttaaaaaatctaagtatattcctattgtactaaatatttttcccaactggaaagcacttgattgtacccgtaagtgtttgagtgatgacatgtgatgattttcagaaagttgttgtttttgtttccatagcctgtttaagtaggttgtaagtttgaatagttagacatggaaattattttataagcacacacctaaagatatctttttagatgataaaatgtacacccccccatcaccaacctcacaacttagaaaatctaagttgtttgatttctttgggatttcttttgttgtgaaacactgcaaagccaatttttctttataaaaattcatagtaatcctgccaaatgtgcctattgttaaagatttgcatgtgaagatcttagggaaccactgtttgagttctacaagctcatgagagtttatttttattataagatgtttttaatataaaagaattatgtaactgatcactatattacatcatttcagtgggccaggaaaatagatgtcttgctgttttcagtattttcttaagaaattgcttttaaaacaaataattgttttacaaaaccaataattatcctttgaattttcatagactgactttgcttttgacgtagaaattttttttctcaataaattatcactttgagaaatgaggcctgtacaaggctgataacctatatgtgatggagatcacccaatgccaagggcagaaagcaaacctagttaaataggtgagaaaaaaaataataatcccagtgccatttgtctgtgcaaagagaattaggagagaggttaatgttacttttttccattttggaaataattttaatcaagtaactcaaatgtgacaaaatttatttttattttttgtggttatattcccaacaacattaaaaaatactcgaggcataaatgtagttgtctcctactctgcttctcttactatactcatacatttttaatatggtttatcaatgattcatgtttccctcaaatagtgatggtttacacctgtcatggaaacaatcctagagagctcagagcaattaaaccactattccatgcttttaagtagttttctccacctttttcttatgagtctcactagattgactgaggaatgtatgtctaaattcctggagaagatgatatggattggaaactgaaattcagagaaatggagtgttcaatagataccacgaattgtgaacaaagggaaaattctatacaactcaatctaagtcagtccactttgacttcgtactgtctttcacctttccattgttgcatcttgaattttttaaaatgtctagaattcaggatgctaggggctacttctttaaaaaaaaaaaaaaaaaagaattcgtctgaaaatgctcaggtttgtaagaatctaatctcacttacataactaagcactccataataagttttattaagtacaaagggagccagaaaaaatgacatttatttcttctagatcagaaaaatttaaattaagccctgccttgctgtttagaaatatgtgggcattgttataatttattcaataaatttatgttcctttgccttcctgtggaaacagttttatcccactaaactaggaattaggggataaatcacaaacaaaaaaaaagttgcagcactgaaaaaaagtaatttattgtttttgcaactggtatgtgaatttgtgtgataaaattatttattcttatttaacaaaaatatgttcaaatttttctatatttaaaatgttttgctgttgtcctactttttaatttatgcttcatgtttgtgtataaagtacacttttacactttgtgagtttacataatatacagcactggttgcttttgtatttttttacagaaagctttctgtgtgaagcaggtgtatatgtatatattcctcatgtattcttattctgatactatcatttttctttccaaggaaattttaatctgtcatgaccaatagtgttcattacttgtgcctatgataataggttttttacatcacattaacactattttttccaagtcacaaataagaaaaacacttattcaatgaaacaaggtgcaagttttaaatttgggtacacaaatagcctagaagcttcctacagacgctaagacacagccaataatcagatcctttcacttcatcgagaaacttggacaagtcgatattgatgtattagatgaaagttgtctacacacaacttctgagggatacaaacgataataaaaccaaatgttgtctgtttctcctttagaaacacctcctaaaattaatatcatttagtctctagtgtctgtaggattctacagatgagcacaaatagattgggtttgtataacaaatgctaatagtcataactgtttctacaaatatggggtgtccattaagagaatgtgatgttttcctactgctgttgaatcccatggggtgattataggacttgaaataggcagagtcacctctgatgacatcagcttgcctctgtgatttcacagtctgatcctggcaacaagacaaagcacccttggacacacagccaatctctggttgtgatatttccccattgattccttccttgttaacaaggtcattttaatggttcaggtgaggacagcagccagattcaaagtccagaatttgtgctgttacatagagttcacactgtcaaataacattgaatttaataatgatcaaatttttctagtagtctttggcagagtgtataatctcattggcatgattggtgaatattactaatctctttataatgaaagatgctttacaaataccttatatttgctaacatttcaaaactactaaataaatgaaatagccatgtgtacagaaatggtcatttaaagctttaatagaaccaaattcaagacaatgtatcatttagacacacagaaaaggaacttgtatgttttccctattatttttctcatttgccaacaatctatagttttaggttatcaaacagatagatcaacttaactggctagtacattgaaaaatcttcctaagaatcctttgttagcataatctatagagataatttctcaaattatatcatcatgatgcatataaactctataatgtataattgtgtttcatttatttaatgtatgagaacatattgaaatacaaaaccatgcattagccaaaaaattggaatacaggtagtgttcagatcagcaaaacattcagtctggtaaatgcctgcctggggctatgatatcattctcaatgcaggttttatggaaaaactaaaagaatatgttgttagatgatgttggttttgaaaaaaaaaagacattaacatacacattagttagcccagttaattgcattctactaatatagttgcacattagcaataattttgctgtctctggtctttattttgtggcttcaactaactggaccatgtggactgtaaaggtcaaatggaaaaaacgagcagtggcccctcatcctgtaaggtactgctacatcagagtgacctaaaagtctaacactgtgaggaaaactgtgatttgtaggaaaaaaaaaaaaaacaaataaaaaacagggcatgctttttaatttttttccactttcctttggcacacccaatgaacaattctaatttttattgaggtgctaacatctttcgtgaccgactgtcaaatgtggtatttttgagttactatttttctacatgattttacagtttgcaagaaagacctctaagctttgtgtcacggtagggcacaacttgatactcaaaatttgaaaaataagcacatccaatgattgttttgaccaacagtggtcagtgacgtaaactgcatgtgcatctgaggacatttaaggggtcattaaaatttgaggagcatcaggccggagtagcagacttttagatgagtcatatttcagcattcactaagtcctcagcattccattcaaactgtcgtgtatatttggcctgattttttttcaagctttgcaataatttatgttattggtaaacacttggtgactatatctcagccttttctttaacaactcacaatatattagaaacacgtctacctatactgagagtatatttacaatagaagaacatactgtatgtgactttgtaaagctagacttttgattaagaaatatataatctctggatgctatttttgcattatacactcaggcacaacgtaaaccttgatggctcatcttgctacaattacgagttgaaaaacactacttacgtatttgtatgacctattagtcagaggaaatcatacatatgctttgtaaatagactttgcagataactaaatagactgaagaaatatgttgcatttgatagaagcaattgcataaatatttggtttctatattagagtctgtgagtaaagtcaagtaataaacctaagtaggtataacagatttttaaaccttgaaacttgctttgatggtagagaaaatcattgaagatttacatactgtatataagatgtaaaatgtacgctgcttattaccctcaattttccagaagcaatggtatataatgcagttgaaaaaccaaaaatcttggaaaactaagacgggtcttgtttaaaatgtctctcagctttggcaaccttcaaatcttaatcaactatttaaagcattactgtgtcttgtagcctgcattccacaacagctctgttattcaggtaaaagacttgaactgagccgtttgggacctatactgtaatattttcattgaggaacaatatcctattttgtaaagcatttccctatgtgtgactttaaactgtaaaattaaacactgcttttgtgggttcagtgggcataataaatataaattgtaaacta

SEQ ID NO: 170 - protein, 930 aa, Homo sapiens
  ADAMTS-5  precursor
MLLGWASLLLCAFRLPLAAVGPAATPAQDKAGQPPTAAAAAQPRRRQGEEVQERAEPPGHPHPLAQRRRSKGLVQNIDQLYSGGGKVGYLVYAGGRRFLLDLERDGSVGIAGFVPAGGGTSAPWRHRSHCFYRGTVDASPRSLAVFDLCGGLDGFFAVKHARYTLKPLLRGPWAEEEKGRVYGDGSARILHVYTREGFSFEALPPRASCETPASTPEAHEHAPAHSNPSGRAALASQLLDQSALSPAGGSGPQTWWRRRRRSISRARQVELLLVADASMARLYGRGLQHYLLTLASIANRLYSHASIENHIRLAVVKVVVLGDKDKSLEVSKNAATTLKNFCKWQHQHNQLGDDHEEHYDAAILFTREDLCGHHSCDTLGMADVGTICSPERSCAVIEDDGLHAAFTVAHEIGHLLGLSHDDSKFCEETFGSTEDKRLMSSILTSIDASKPWSKCTSATITEFLDDGHGNCLLDLPRKQILGPEELPGQTYDATQQCNLTFGPEYSVCPGMDVCARLWCAVVRQGQMVCLTKKLPAVEGTPCGKGRICLQGKCVDKTKKKYYSTSSHGNWGSWGSWGQCSRSCGGGVQFAYRHCNNPAPRNNGRYCTGKRAIYRSCSLMPCPPNGKSFRHEQCEAKNGYQSDAKGVKTFVEWVPKYAGVLPADVCKLTCRAKGTGYYVVFSPKVTDGTECRPYSNSVCVRGKCVRTGCDGIIGSKLQYDKCGVCGGDNSSCTKIVGTFNKKSKGYTDVVRIPEGATHIKVRQFKAKDQTRFTAYLALKKKNGEYLINGKYMISTSETIIDINGTVMNYSGWSHRDDFLHGMGYSATKEILIVQILATDPTKPLDVRYSFFVPKKSTPKVNSVTSHGSNKVGSHTSQPQWVTGPWLACSRTCDTGWHTRTVQCQDGNRKLAKGCPLSQRPSAFKQCLLKKC

SEQ ID NO: 171 - protein, 669 aa, Homo sapiens
  ADAMTS-5  mature
SISRARQVELLLVADASMARLYGRGLQHYLLTLASIANRLYSHASIENHIRLAVVKVVVLGDKDKSLEVSKNAATTLKNFCKWQHQHNQLGDDHEEHYDAAILFTREDLCGHHSCDTLGMADVGTICSPERSCAVIEDDGLHAAFTVAHEIGHLLGLSHDDSKFCEETFGSTEDKRLMSSILTSIDASKPWSKCTSATITEFLDDGHGNCLLDLPRKQILGPEELPGQTYDATQQCNLTFGPEYSVCPGMDVCARLWCAVVRQGQMVCLTKKLPAVEGTPCGKGRICLQGKCVDKTKKKYYSTSSHGNWGSWGSWGQCSRSCGGGVQFAYRHCNNPAPRNNGRYCTGKRAIYRSCSLMPCPPNGKSFRHEQCEAKNGYQSDAKGVKTFVEWVPKYAGVLPADVCKLTCRAKGTGYYVVFSPKVTDGTECRPYSNSVCVRGKCVRTGCDGIIGSKLQYDKCGVCGGDNSSCTKIVGTFNKKSKGYTDVVRIPEGATHIKVRQFKAKDQTRFTAYLALKKKNGEYLINGKYMISTSETIIDINGTVMNYSGWSHRDDFLHGMGYSATKEILIVQILATDPTKPLDVRYSFFVPKKSTPKVNSVTSHGSNKVGSHTSQPQWVTGPWLACSRTCDTGWHTRTVQCQDGNRKLAKGCPLSQRPSAFKQCLLKKC

SEQ ID NO: 172 - DNA, 5269 bp, Homo sapiens
  unsure (0)...(0): ADAMTS14  transcript variant 1
atggctccactccgcgcgctgctgtcctacctgctgcctttgcactgtgcgctctgcgccgccgcgggcagccggaccccagagctgcacctctctggaaagctcagtgactatggtgtgacagtgccctgcagcacagactttcggggacgcttcctctcccacgtggtgtctggcccagcagcagcctctgcagggagcatggtagtggacacgccacccacactaccacgacactccagtcacctccgggtggctcgcagccctctgcacccaggagggaccctgtggcctggcagggtggggcgccactccctctacttcaatgtcactgttttcgggaaggaactgcacttgcgcctgcggcccaatcggaggttggtagtgccaggatcctcagtggagtggcaggaggattttcgggagctgttccggcagcccttacggcaggagtgtgtgtacactggaggtgtcactggaatgcctggggcagctgttgccatcagcaactgtgacggattggcgggcctcatccgcacagacagcaccgacttcttcattgagcctctggagcggggccagcaggagaaggaggccagcgggaggacacatgtggtgtaccgccgggaggccgtccagcaggagtgggcagaacctgacggggacctgcacaatgaagcctttggcctgggagaccttcccaacctgctgggcctggtgggggaccagctgggcgacacagagcggaagcggcggcatgccaagccaggcagctacagcatcgaggtgctgctggtggtggacgactcggtggttcgcttccatggcaaggagcatgtgcagaactatgtcctcaccctcatgaatatcgtagatgagatttaccacgatgagtccctgggggttcatataaatattgccctcgtccgcttgatcatggttggctaccgacagtccctgagcctgatcgagcgcgggaacccctcacgcagcctggagcaggtgtgtcgctgggcacactcccagcagcgccaggaccccagccacgctgagcaccatgaccacgttgtgttcctcacccggcaggactttgggccctcaggtatgcaagggtatgcacccgtcactggcatgtgtcaccccctgaggagctgtgccctcaaccatgaggatggcttctcctcagccttcgtgatagctcatgagaccggccacgtgctcggcatggagcatgacggtcaggggaatggctgtgcagatgagaccagcctgggcagcgtcatggcgcccctggtgcaggctgccttccaccgcttccattggtcccgctgcagcaagctggagctcagccgctacctcccctcctacgactgcctcctcgatgacccctttgatcctgcctggccccagcccccagagctgcctgggatcaactactcaatggatgagcagtgccgctttgactttggcagtggctaccagacctgcttggcattcaggacctttgagccctgcaagcagctgtggtgcagccatcctgacaacccgtacttctgcaagaccaagaaggggcccccgctggatgggactgagtgtgcacccggcaagtggtgcttcaaaggtcactgcatctggaagtcgccggagcagacatatggccaggatggaggctggagctcctggaccaagtttgggtcatgttcgcggtcatgtgggggcggggtgcgatcccgcagccggagctgcaacaacccctccccagcctatggaggccgcctgtgcttagggcccatgttcgagtaccaggtctgcaacagcgaggagtgccctgggacctacgaggacttccgggcccagcagtgtgccaagcgcaactcctactatgtgcaccagaatgccaagcacagctgggtgccctacgagcctgacgatgacgcccagaagtgtgagctgatctgccagtcggcggacacgggggacgtggtgttcatgaaccaggtggttcacgatgggacacgctgcagctaccgggacccatacagcgtctgtgcgcgtggcgagtgtgtgcctgtcggctgtgacaaggaggtggggtccatgaaggcggatgacaagtgtggagtctgcgggggtgacaactcccactgcaggactgtgaaggggacgctgggcaaggcctccaagcaggcaggagctctcaagctggtgcagatcccagcaggtgccaggcacatccagattgaggcactggagaagtccccccaccgcattgtggtgaagaaccaggtcaccggcagcttcatcctcaaccccaagggcaaggaagccacaagccggaccttcaccgccatgggcctggagtgggaggatgcggtggaggatgccaaggaaagcctcaagaccagcgggcccctgcctgaagccattgccatcctggctctccccccaactgagggtggcccccgcagcagcctggcctacaagtacgtcatccatgaggacctgctgccccttatcgggagcaacaatgtgctcctggaggagatggacacctatgagtgggcgctcaagagctgggccccctgcagcaaggcctgtggaggagggatccagttcaccaaatacggctgccggcgcagacgagaccaccacatggtgcagcgacacctgtgtgaccacaagaagaggcccaagcccatccgccggcgctgcaaccagcacccgtgctctcagcctgtgtgggtgacggaggagtggggtgcctgcagccggagctgtgggaagctgggggtgcagacacgggggatacagtgcctgctgcccctctccaatggaacccacaaggtcatgccggccaaagcctgcgccggggaccggcctgaggcccgacggccctgtctccgagtgccctgcccagcccagtggaggctgggagcctggtcccagtgctctgccacctgtggagagggcatccagcagcggcaggtggtgtgcaggaccaacgccaacagcctcgggcattgcgagggggataggccagacactgtccaggtctgcagcctgcccgcctgtggaggaaatcaccagaactccacggtgagggccgatgtctgggaacttgggacgccagaggggcagtgggtgccacaatctgaacccctacatcccattaacaagatatcatcaacggagccctgcacgggagacaggtctgtcttctgccagatggaagtgctcgatcgctactgctccattcccggctaccaccggctctgctgtgtgtcctgcatcaagaaggcctcgggccccaaccctggcccagaccctggcccaacctcactgccccccttctccactcctggaagccccttaccaggaccccaggaccctgcagatgctgcagagcctcctggaaagccaacgggatcagaggaccatcagcatggccgagccacacagctcccaggagctctggatacaagctccccagggacccagcatccctttgcccctgagacaccaatccctggagcatcctggagcatctcccctaccacccccggggggctgccttggggctggactcagacacctacgccagtccctgaggacaaagggcaacctggagaagacctgagacatcccggcaccagcctccctgctgcctccccggtgacatgagctgtgccctgccatcccactggcacgtttacactctgtgtactgccccgtgactcccagctcagaggacacacatagcagggcaggcgcaagcacagacttcattttaaatcattcgccttcttctcgtttggggctgtgatgctctttaccccacaaagcggggtgggaggaagacaaagatcagggaaagccctaatcggagatacctcagcaagctgcccccggcgggactgaccctctcagggcccctgttggtctcccctgccaagaccagggtcaactattgctccctcctcacagaccctgggcctgggcaggtctgaatcccggctggtctgtagctagaagctgtcagggctgcctgccttcccggaactgtgaggacccctgtggaggccctgcatatttggcccctctccccagaaaggcaaagcagggccagggtaggtgggggactgttcacagccaggccgagaggaggggggcctgggaatgtggcatgaggcttcccagctgcagggctggagggggtggaacacaaggtgatcgcaggcccagctcctggaagccaagagctccatgcagttccaccagctgaggccaggcagcagaggccagtttgtctttgctggccagaagatggtgctcatggccatactctggccttgcagatgtcactagtgttacttctagtgactccagattacagactggccccccaatctcaccccagcccaccagagaagggggctcaggacaccctggaccccaagtcctcagcatccagggatttccaaactggcgctcactccctgactccaccaggatggcaacttcaattatcactctcagcctggaaggggactctgtgggacacagagggaacacgatttctcaggctgtcccttcaatcattgcccttctccgaagatcgctcctgctggagtcggacatcttcatcttctacctggctcaagctgggccagagtgtgtggttctcccaggggtggttggaccccaggactgaggaccagagtccactcatagcctggccctggagatgacaagggccacccaggccaagtgccccagggcagggtgccagcccctggcctggtgctggagtggggaagacacactcacccacggtgctgtaagggcctgagctgtgctcagctgccggccatgctacctccaagggacaggtaacagtcttagatcctctggctctcaggaagtggcagggggtcccaggacacctccggggtcttggaggatgtctcctaaactcctgccaggtgatagaggtgcttctcacttcttccttccccaaggcaaaggggctgttctgagccagcctggaggaacatgagtagtgggcccctggcctgcaacccctttggagagtggaggtcctggggggctccccgccctccccctgttgccctcccctccctgggatgctggggcacacgcggagtcattcctgtgagaaccagcctggcctgtgttaaactcttgtgccttggaaatccagatctttaaaattttatgtatttattaacatcgccattggaccccaaaa

SEQ ID NO: 173 - protein, 1226 aa, Homo sapiens
  ADAMTS14 isoform 1 precursor
MAPLRALLSYLLPLHCALCAAAGSRTPELHLSGKLSDYGVTVPCSTDFRGRFLSHVVSGPAAASAGSMVVDTPPTLPRHSSHLRVARSPLHPGGTLWPGRVGRHSLYFNVTVFGKELHLRLRPNRRLVVPGSSVEWQEDFRELFRQPLRQECVYTGGVTGMPGAAVAISNCDGLAGLIRTDSTDFFIEPLERGQQEKEASGRTHVVYRREAVQQEWAEPDGDLHNEAFGLGDLPNLLGLVGDQLGDTERKRRHAKPGSYSIEVLLVVDDSVVRFHGKEHVQNYVLTLMNIVDEIYHDESLGVHINIALVRLIMVGYRQSLSLIERGNPSRSLEQVCRWAHSQQRQDPSHAEHHDHVVFLTRQDFGPSGMQGYAPVTGMCHPLRSCALNHEDGFSSAFVIAHETGHVLGMEHDGQGNGCADETSLGSVMAPLVQAAFHRFHWSRCSKLELSRYLPSYDCLLDDPFDPAWPQPPELPGINYSMDEQCRFDFGSGYQTCLAFRTFEPCKQLWCSHPDNPYFCKTKKGPPLDGTECAPGKWCFKGHCIWKSPEQTYGQDGGWSSWTKFGSCSRSCGGGVRSRSRSCNNPSPAYGGRLCLGPMFEYQVCNSEECPGTYEDFRAQQCAKRNSYYVHQNAKHSWVPYEPDDDAQKCELICQSADTGDVVFMNQVVHDGTRCSYRDPYSVCARGECVPVGCDKEVGSMKADDKCGVCGGDNSHCRTVKGTLGKASKQAGALKLVQIPAGARHIQIEALEKSPHRIVVKNQVTGSFILNPKGKEATSRTFTAMGLEWEDAVEDAKESLKTSGPLPEAIAILALPPTEGGPRSSLAYKYVIHEDLLPLIGSNNVLLEEMDTYEWALKSWAPCSKACGGGIQFTKYGCRRRRDHHMVQRHLCDHKKRPKPIRRRCNQHPCSQPVWVTEEWGACSRSCGKLGVQTRGIQCLLPLSNGTHKVMPAKACAGDRPEARRPCLRVPCPAQWRLGAWSQCSATCGEGIQQRQVVCRTNANSLGHCEGDRPDTVQVCSLPACGGNHQNSTVRADVWELGTPEGQWVPQSEPLHPINKISSTEPCTGDRSVFCQMEVLDRYCSIPGYHRLCCVSCIKKASGPNPGPDPGPTSLPPFSTPGSPLPGPQDPADAAEPPGKPTGSEDHQHGRATQLPGALDTSSPGTQHPFAPETPIPGASWSISPTTPGGLPWGWTQTPTPVPEDKGQPGEDLRHPGTSLPAASPVT

SEQ ID NO: 174 - protein, 974 aa, Homo sapiens
  ADAMTS14 isoform 1 mature
HAKPGSYSIEVLLVVDDSVVRFHGKEHVQNYVLTLMNIVDEIYHDESLGVHINIALVRLIMVGYRQSLSLIERGNPSRSLEQVCRWAHSQQRQDPSHAEHHDHVVFLTRQDFGPSGMQGYAPVTGMCHPLRSCALNHEDGFSSAFVIAHETGHVLGMEHDGQGNGCADETSLGSVMAPLVQAAFHRFHWSRCSKLELSRYLPSYDCLLDDPFDPAWPQPPELPGINYSMDEQCRFDFGSGYQTCLAFRTFEPCKQLWCSHPDNPYFCKTKKGPPLDGTECAPGKWCFKGHCIWKSPEQTYGQDGGWSSWTKFGSCSRSCGGGVRSRSRSCNNPSPAYGGRLCLGPMFEYQVCNSEECPGTYEDFRAQQCAKRNSYYVHQNAKHSWVPYEPDDDAQKCELICQSADTGDVVFMNQVVHDGTRCSYRDPYSVCARGECVPVGCDKEVGSMKADDKCGVCGGDNSHCRTVKGTLGKASKQAGALKLVQIPAGARHIQIEALEKSPHRIVVKNQVTGSFILNPKGKEATSRTFTAMGLEWEDAVEDAKESLKTSGPLPEAIAILALPPTEGGPRSSLAYKYVIHEDLLPLIGSNNVLLEEMDTYEWALKSWAPCSKACGGGIQFTKYGCRRRRDHHMVQRHLCDHKKRPKPIRRRCNQHPCSQPVWVTEEWGACSRSCGKLGVQTRGIQCLLPLSNGTHKVMPAKACAGDRPEARRPCLRVPCPAQWRLGAWSQCSATCGEGIQQRQVVCRTNANSLGHCEGDRPDTVQVCSLPACGGNHQNSTVRADVWELGTPEGQWVPQSEPLHPINKISSTEPCTGDRSVFCQMEVLDRYCSIPGYHRLCCVSCIKKASGPNPGPDPGPTSLPPFSTPGSPLPGPQDPADAAEPPGKPTGSEDHQHGRATQLPGALDTSSPGTQHPFAPETPIPGASWSISPTTPGGLPWGWTQTPTPVPEDKGQPGEDLRHPGTSLPAASPVT

SEQ ID NO: 175 - DNA, 5260 bp, Homo sapiens
  ADAMTS14  transcript variant 2
atggctccactccgcgcgctgctgtcctacctgctgcctttgcactgtgcgctctgcgccgccgcgggcagccggaccccagagctgcacctctctggaaagctcagtgactatggtgtgacagtgccctgcagcacagactttcggggacgcttcctctcccacgtggtgtctggcccagcagcagcctctgcagggagcatggtagtggacacgccacccacactaccacgacactccagtcacctccgggtggctcgcagccctctgcacccaggagggaccctgtggcctggcagggtggggcgccactccctctacttcaatgtcactgttttcgggaaggaactgcacttgcgcctgcggcccaatcggaggttggtagtgccaggatcctcagtggagtggcaggaggattttcgggagctgttccggcagcccttacggcaggagtgtgtgtacactggaggtgtcactggaatgcctggggcagctgttgccatcagcaactgtgacggattggcgggcctcatccgcacagacagcaccgacttcttcattgagcctctggagcggggccagcaggagaaggaggccagcgggaggacacatgtggtgtaccgccgggaggccgtccagcaggagtgggcagaacctgacggggacctgcacaatgaagcctttggcctgggagaccttcccaacctgctgggcctggtgggggaccagctgggcgacacagagcggaagcggcggcatgccaagccaggcagctacagcatcgaggtgctgctggtggtggacgactcggtggttcgcttccatggcaaggagcatgtgcagaactatgtcctcaccctcatgaatatcgtagatgagatttaccacgatgagtccctgggggttcatataaatattgccctcgtccgcttgatcatggttggctaccgacagtccctgagcctgatcgagcgcgggaacccctcacgcagcctggagcaggtgtgtcgctgggcacactcccagcagcgccaggaccccagccacgctgagcaccatgaccacgttgtgttcctcacccggcaggactttgggccctcagggtatgcacccgtcactggcatgtgtcaccccctgaggagctgtgccctcaaccatgaggatggcttctcctcagccttcgtgatagctcatgagaccggccacgtgctcggcatggagcatgacggtcaggggaatggctgtgcagatgagaccagcctgggcagcgtcatggcgcccctggtgcaggctgccttccaccgcttccattggtcccgctgcagcaagctggagctcagccgctacctcccctcctacgactgcctcctcgatgacccctttgatcctgcctggccccagcccccagagctgcctgggatcaactactcaatggatgagcagtgccgctttgactttggcagtggctaccagacctgcttggcattcaggacctttgagccctgcaagcagctgtggtgcagccatcctgacaacccgtacttctgcaagaccaagaaggggcccccgctggatgggactgagtgtgcacccggcaagtggtgcttcaaaggtcactgcatctggaagtcgccggagcagacatatggccaggatggaggctggagctcctggaccaagtttgggtcatgttcgcggtcatgtgggggcggggtgcgatcccgcagccggagctgcaacaacccctccccagcctatggaggccgcctgtgcttagggcccatgttcgagtaccaggtctgcaacagcgaggagtgccctgggacctacgaggacttccgggcccagcagtgtgccaagcgcaactcctactatgtgcaccagaatgccaagcacagctgggtgccctacgagcctgacgatgacgcccagaagtgtgagctgatctgccagtcggcggacacgggggacgtggtgttcatgaaccaggtggttcacgatgggacacgctgcagctaccgggacccatacagcgtctgtgcgcgtggcgagtgtgtgcctgtcggctgtgacaaggaggtggggtccatgaaggcggatgacaagtgtggagtctgcgggggtgacaactcccactgcaggactgtgaaggggacgctgggcaaggcctccaagcaggcaggagctctcaagctggtgcagatcccagcaggtgccaggcacatccagattgaggcactggagaagtccccccaccgcattgtggtgaagaaccaggtcaccggcagcttcatcctcaaccccaagggcaaggaagccacaagccggaccttcaccgccatgggcctggagtgggaggatgcggtggaggatgccaaggaaagcctcaagaccagcgggcccctgcctgaagccattgccatcctggctctccccccaactgagggtggcccccgcagcagcctggcctacaagtacgtcatccatgaggacctgctgccccttatcgggagcaacaatgtgctcctggaggagatggacacctatgagtgggcgctcaagagctgggccccctgcagcaaggcctgtggaggagggatccagttcaccaaatacggctgccggcgcagacgagaccaccacatggtgcagcgacacctgtgtgaccacaagaagaggcccaagcccatccgccggcgctgcaaccagcacccgtgctctcagcctgtgtgggtgacggaggagtggggtgcctgcagccggagctgtgggaagctgggggtgcagacacgggggatacagtgcctgctgcccctctccaatggaacccacaaggtcatgccggccaaagcctgcgccggggaccggcctgaggcccgacggccctgtctccgagtgccctgcccagcccagtggaggctgggagcctggtcccagtgctctgccacctgtggagagggcatccagcagcggcaggtggtgtgcaggaccaacgccaacagcctcgggcattgcgagggggataggccagacactgtccaggtctgcagcctgcccgcctgtggaggaaatcaccagaactccacggtgagggccgatgtctgggaacttgggacgccagaggggcagtgggtgccacaatctgaacccctacatcccattaacaagatatcatcaacggagccctgcacgggagacaggtctgtcttctgccagatggaagtgctcgatcgctactgctccattcccggctaccaccggctctgctgtgtgtcctgcatcaagaaggcctcgggccccaaccctggcccagaccctggcccaacctcactgccccccttctccactcctggaagccccttaccaggaccccaggaccctgcagatgctgcagagcctcctggaaagccaacgggatcagaggaccatcagcatggccgagccacacagctcccaggagctctggatacaagctccccagggacccagcatccctttgcccctgagacaccaatccctggagcatcctggagcatctcccctaccacccccggggggctgccttggggctggactcagacacctacgccagtccctgaggacaaagggcaacctggagaagacctgagacatcccggcaccagcctccctgctgcctccccggtgacatgagctgtgccctgccatcccactggcacgtttacactctgtgtactgccccgtgactcccagctcagaggacacacatagcagggcaggcgcaagcacagacttcattttaaatcattcgccttcttctcgtttggggctgtgatgctctttaccccacaaagcggggtgggaggaagacaaagatcagggaaagccctaatcggagatacctcagcaagctgcccccggcgggactgaccctctcagggcccctgttggtctcccctgccaagaccagggtcaactattgctccctcctcacagaccctgggcctgggcaggtctgaatcccggctggtctgtagctagaagctgtcagggctgcctgccttcccggaactgtgaggacccctgtggaggccctgcatatttggcccctctccccagaaaggcaaagcagggccagggtaggtgggggactgttcacagccaggccgagaggaggggggcctgggaatgtggcatgaggcttcccagctgcagggctggagggggtggaacacaaggtgatcgcaggcccagctcctggaagccaagagctccatgcagttccaccagctgaggccaggcagcagaggccagtttgtctttgctggccagaagatggtgctcatggccatactctggccttgcagatgtcactagtgttacttctagtgactccagattacagactggccccccaatctcaccccagcccaccagagaagggggctcaggacaccctggaccccaagtcctcagcatccagggatttccaaactggcgctcactccctgactccaccaggatggcaacttcaattatcactctcagcctggaaggggactctgtgggacacagagggaacacgatttctcaggctgtcccttcaatcattgcccttctccgaagatcgctcctgctggagtcggacatcttcatcttctacctggctcaagctgggccagagtgtgtggttctcccaggggtggttggaccccaggactgaggaccagagtccactcatagcctggccctggagatgacaagggccacccaggccaagtgccccagggcagggtgccagcccctggcctggtgctggagtggggaagacacactcacccacggtgctgtaagggcctgagctgtgctcagctgccggccatgctacctccaagggacaggtaacagtcttagatcctctggctctcaggaagtggcagggggtcccaggacacctccggggtcttggaggatgtctcctaaactcctgccaggtgatagaggtgcttctcacttcttccttccccaaggcaaaggggctgttctgagccagcctggaggaacatgagtagtgggcccctggcctgcaacccctttggagagtggaggtcctggggggctccccgccctccccctgttgccctcccctccctgggatgctggggcacacgcggagtcattcctgtgagaaccagcctggcctgtgttaaactcttgtgccttggaaatccagatctttaaaattttatgtatttattaacatcgccattggaccccaaaa

SEQ ID NO: 176 - protein, 1223 aa, Homo sapiens
  ADAMTS14 isoform b precursor
MAPLRALLSYLLPLHCALCAAAGSRTPELHLSGKLSDYGVTVPCSTDFRGRFLSHVVSGPAAASAGSMVVDTPPTLPRHSSHLRVARSPLHPGGTLWPGRVGRHSLYFNVTVFGKELHLRLRPNRRLVVPGSSVEWQEDFRELFRQPLRQECVYTGGVTGMPGAAVAISNCDGLAGLIRTDSTDFFIEPLERGQQEKEASGRTHVVYRREAVQQEWAEPDGDLHNEAFGLGDLPNLLGLVGDQLGDTERKRRHAKPGSYSIEVLLVVDDSVVRFHGKEHVQNYVLTLMNIVDEIYHDESLGVHINIALVRLIMVGYRQSLSLIERGNPSRSLEQVCRWAHSQQRQDPSHAEHHDHVVFLTRQDFGPSGYAPVTGMCHPLRSCALNHEDGFSSAFVIAHETGHVLGMEHDGQGNGCADETSLGSVMAPLVQAAFHRFHWSRCSKLELSRYLPSYDCLLDDPFDPAWPQPPELPGINYSMDEQCRFDFGSGYQTCLAFRTFEPCKQLWCSHPDNPYFCKTKKGPPLDGTECAPGKWCFKGHCIWKSPEQTYGQDGGWSSWTKFGSCSRSCGGGVRSRSRSCNNPSPAYGGRLCLGPMFEYQVCNSEECPGTYEDFRAQQCAKRNSYYVHQNAKHSWVPYEPDDDAQKCELICQSADTGDVVFMNQVVHDGTRCSYRDPYSVCARGECVPVGCDKEVGSMKADDKCGVCGGDNSHCRTVKGTLGKASKQAGALKLVQIPAGARHIQIEALEKSPHRIVVKNQVTGSFILNPKGKEATSRTFTAMGLEWEDAVEDAKESLKTSGPLPEAIAILALPPTEGGPRSSLAYKYVIHEDLLPLIGSNNVLLEEMDTYEWALKSWAPCSKACGGGIQFTKYGCRRRRDHHMVQRHLCDHKKRPKPIRRRCNQHPCSQPVWVTEEWGACSRSCGKLGVQTRGIQCLLPLSNGTHKVMPAKACAGDRPEARRPCLRVPCPAQWRLGAWSQCSATCGEGIQQRQVVCRTNANSLGHCEGDRPDTVQVCSLPACGGNHQNSTVRADVWELGTPEGQWVPQSEPLHPINKISSTEPCTGDRSVFCQMEVLDRYCSIPGYHRLCCVSCIKKASGPNPGPDPGPTSLPPFSTPGSPLPGPQDPADAAEPPGKPTGSEDHQHGRATQLPGALDTSSPGTQHPFAPETPIPGASWSISPTTPGGLPWGWTQTPTPVPEDKGQPGEDLRHPGTSLPAASPVT

SEQ ID NO: 177 - protein, 971 aa, Homo sapiens
  ADAMTS14 isoform 2 mature
HAKPGSYSIEVLLVVDDSVVRFHGKEHVQNYVLTLMNIVDEIYHDESLGVHINIALVRLIMVGYRQSLSLIERGNPSRSLEQVCRWAHSQQRQDPSHAEHHDHVVFLTRQDFGPSGYAPVTGMCHPLRSCALNHEDGFSSAFVIAHETGHVLGMEHDGQGNGCADETSLGSVMAPLVQAAFHRFHWSRCSKLELSRYLPSYDCLLDDPFDPAWPQPPELPGINYSMDEQCRFDFGSGYQTCLAFRTFEPCKQLWCSHPDNPYFCKTKKGPPLDGTECAPGKWCFKGHCIWKSPEQTYGQDGGWSSWTKFGSCSRSCGGGVRSRSRSCNNPSPAYGGRLCLGPMFEYQVCNSEECPGTYEDFRAQQCAKRNSYYVHQNAKHSWVPYEPDDDAQKCELICQSADTGDVVFMNQVVHDGTRCSYRDPYSVCARGECVPVGCDKEVGSMKADDKCGVCGGDNSHCRTVKGTLGKASKQAGALKLVQIPAGARHIQIEALEKSPHRIVVKNQVTGSFILNPKGKEATSRTFTAMGLEWEDAVEDAKESLKTSGPLPEAIAILALPPTEGGPRSSLAYKYVIHEDLLPLIGSNNVLLEEMDTYEWALKSWAPCSKACGGGIQFTKYGCRRRRDHHMVQRHLCDHKKRPKPIRRRCNQHPCSQPVWVTEEWGACSRSCGKLGVQTRGIQCLLPLSNGTHKVMPAKACAGDRPEARRPCLRVPCPAQWRLGAWSQCSATCGEGIQQRQVVCRTNANSLGHCEGDRPDTVQVCSLPACGGNHQNSTVRADVWELGTPEGQWVPQSEPLHPINKISSTEPCTGDRSVFCQMEVLDRYCSIPGYHRLCCVSCIKKASGPNPGPDPGPTSLPPFSTPGSPLPGPQDPADAAEPPGKPTGSEDHQHGRATQLPGALDTSSPGTQHPFAPETPIPGASWSISPTTPGGLPWGWTQTPTPVPEDKGQPGEDLRHPGTSLPAASPVT

SEQ ID NO: 178 - DNA, 1904 bp, Homo sapiens
  Cathepsin C
agctatttcaaggcgcgcgcctcgtggtggactcaccgctagcccgcagcgctcggcttcctggtaattcttcacctcttttctcagctccctgcagcatgggtgctgggccctccttgctgctcgccgccctcctgctgcttctctccggcgacggcgccgtgcgctgcgacacacctgccaactgcacctatcttgacctgctgggcacctgggtcttccaggtgggctccagcggttcccagcgcgatgtcaactgctcggttatgggaccacaagaaaaaaaagtagtggtgtaccttcagaagctggatacagcatatgatgaccttggcaattctggccatttcaccatcatttacaaccaaggctttgagattgtgttgaatgactacaagtggtttgccttttttaagtataaagaagagggcagcaaggtgaccacttactgcaacgagacaatgactgggtgggtgcatgatgtgttgggccggaactgggcttgtttcaccggaaagaaggtgggaactgcctctgagaatgtgtatgtcaacacagcacaccttaagaattctcaggaaaagtattctaataggctctacaagtatgatcacaactttgtgaaagctatcaatgccattcagaagtcttggactgcaactacatacatggaatatgagactcttaccctgggagatatgattaggagaagtggtggccacagtcgaaaaatcccaaggcccaaacctgcaccactgactgctgaaatacagcaaaagattttgcatttgccaacatcttgggactggagaaatgttcatggtatcaattttgtcagtcctgttcgaaaccaagcatcctgtggcagctgctactcatttgcttctatgggtatgctagaagcgagaatccgtatactaaccaacaattctcagaccccaatcctaagccctcaggaggttgtgtcttgtagccagtatgctcaaggctgtgaaggcggcttcccataccttattgcaggaaagtacgcccaagattttgggctggtggaagaagcttgcttcccctacacaggcactgattctccatgcaaaatgaaggaagactgctttcgttattactcctctgagtaccactatgtaggaggtttctatggaggctgcaatgaagccctgatgaagcttgagttggtccatcatgggcccatggcagttgcttttgaagtatatgatgacttcctccactacaaaaaggggatctaccaccacactggtctaagagaccctttcaacccctttgagctgactaatcatgctgttctgcttgtgggctatggcactgactcagcctctgggatggattactggattgttaaaaacagctggggcaccggctggggtgagaatggctacttccggatccgcagaggaactgatgagtgtgcaattgagagcatagcagtggcagccacaccaattcctaaattgtagggtatgccttccagtatttcataatgatctgcatcagttgtaaaggggaattggtatattcacagactgtagactttcagcagcaatctcagaagcttacaaatagatttccatgaagatatttgtcttcagaattaaaactgcccttaattttaatatacctttcaatcggccactggccatttttttctaagtattcaattaagtgggaattttctggaagatggtcagctatgaagtaatagagtttgcttaatcatttgtaattcaaacatgctatattttttaaaatcaatgtgaaaacatagacttatttttaaattgtaccaatcacaagaaaataatggcaataattatcaaaacttttaaaatagatgctcatatttttaaaataaagttttaaaaataactgca

SEQ ID NO: 179 - protein, 463 aa, Homo sapiens
  Cathepsin C precursor
MGAGPSLLLAALLLLLSGDGAVRCDTPANCTYLDLLGTWVFQVGSSGSQRDVNCSVMGPQEKKVVVYLQKLDTAYDDLGNSGHFTIIYNQGFEIVLNDYKWFAFFKYKEEGSKVTTYCNETMTGWVHDVLGRNWACFTGKKVGTASENVYVNTAHLKNSQEKYSNRLYKYDHNFVKAINAIQKSWTATTYMEYETLTLGDMIRRSGGHSRKIPRPKPAPLTAEIQQKILHLPTSWDWRNVHGINFVSPVRNQASCGSCYSFASMGMLEARIRILTNNSQTPILSPQEVVSCSQYAQGCEGGFPYLIAGKYAQDFGLVEEACFPYTGTDSPCKMKEDCFRYYSSEYHYVGGFYGGCNEALMKLELVHHGPMAVAFEVYDDFLHYKKGIYHHTGLRDPFNPFELTNHAVLLVGYGTDSASGMDYWIVKNSWGTGWGENGYFRIRRGTDECAIESIAVAATPIPKL

SEQ ID NO: 180 - protein, 343 aa, Homo sapiens
  Cathepsin C mature
  Dipeptidyl-peptidase 1 exclusion domain chain 1-110
  Dipeptidyl-peptidase 1 heavy chain 111-274
  Dipeptidyl-peptidase 1 light chain 275-343
DTPANCTYLDLLGTWVFQVGSSGSQRDVNCSVMGPQEKKVVVYLQKLDTAYDDLGNSGHFTIIYNQGFEIVLNDYKWFAFFKYKEEGSKVTTYCNETMTGWVHDVLGRNWLPTSWDWRNVHGINFVSPVRNQASCGSCYSFASMGMLEARIRILTNNSQTPILSPQEVVSCSQYAQGCEGGFPYLIAGKYAQDFGLVEEACFPYTGTDSPCKMKEDCFRYYSSEYHYVGGFYGGCNEALMKLELVHHGPMAVAFEVYDDFLHYKKGIYHHTGLRDPFNPFELTNHAVLLVGYGTDSASGMDYWIVKNSWGTGWGENGYFRIRRGTDECAIESIAVAATPIPKL

SEQ ID NO: 181 - DNA, 2032 bp, Homo sapiens
  cathepsin F
ggaggactcaggccccgctggccgcgggctcggtacccggtgggtcggtggagcgtctgttgggtccgggccgccggcttcgccctcgccatggcgccctggctgcagctcctgtcgctgctggggctgctcccgggcgcagtggccgcccccgcccagccccgagccgccagctttcaggcctgggggccgccgtccccggagctgctggcgcccacccgcttcgcgctggagatgttcaaccgcggccgggctgcggggacgcgggccgtgctgggccttgtgcgcggccgcgtccgccgggcgggtcaggggtcgctgtactccctggaggccaccctggaggagccaccctgcaacgaccccatggtgtgccggctccccgtgtccaagaaaaccctgctctgcagcttccaagtcctggatgagctcggaagacacgtgctgctgcggaaggactgtggcccagtggacaccaaggttccaggtgctggggagcccaagtcagccttcactcagggctcagccatgatttcttctctgtcccaaaaccatccagacaacagaaacgagactttcagctcagtcatttccctgttgaatgaggatcccctgtcccaggacttgcctgtgaagatggcttcaatcttcaagaactttgtcattacctataaccggacatatgagtcaaaggaagaagcccggtggcgcctgtccgtctttgtcaataacatggtgcgagcacagaagatccaggccctggaccgtggcacagctcagtatggagtcaccaagttcagtgatctcacagaggaggagttccgcactatctacctgaatactctcctgaggaaagagcctggcaacaagatgaagcaagccaagtctgtgggtgacctcgccccacctgaatgggactggaggagtaagggggctgtcacaaaagtcaaagaccagggcatgtgtggctcctgctgggccttctcagtcacaggcaatgtggagggccagtggtttctcaaccaggggaccctgctctccctctctgaacaggagctcttggactgtgacaagatggacaaggcctgcatgggcggcttgccctccaatgcctactcggccataaagaatttgggagggctggagacagaggatgactacagctaccagggtcacatgcagtcctgcaacttctcagcagagaaggccaaggtctacatcaatgactccgtggagctgagccagaacgagcagaagctggcagcctggctggccaagagaggcccaatctccgtggccatcaatgcctttggcatgcagttttaccgccacgggatctcccgccctctccggcccctctgcagcccttggctcattgaccatgcggtgttgcttgtgggctacggcaaccgctctgacgttcccttttgggccatcaagaacagctggggcactgactggggtgagaagggttactactacttgcatcgtgggtccggggcctgtggcgtgaacaccatggccagctcggcggtggtggactgaagaggggcccccagctcgggacctggtgctgatcagagtggctgctgccccagcctgacatgtgtccaggcccctccccgggaggtacagctggcagagggaaaggcactgggtacctcagggtgagcagagggcactgggctggggcacagcccctgcttccctgcaccccattcccaccctgaagttctgcacctgcacctttgttgaattgtggtagcttaggaggatgtcggggtgaagggtggtatcttggcagttgaagctggggcaagaactctgggcttgggtaatgagcaggaagaaaattttctgatcttaagcccagctctgttctgcccccgctttcctctgtttgatactataaattttctggttcccttggatttagggatagtgtccctctccatgtccaggaaacttgtaaccacccttttctaacagcaataaagaggtgtccttgtcccgaaaaaaaaaaaaaaaaaaa

SEQ ID NO: 182 - protein, 484 aa, Homo sapiens [sequence omitted]

SEQ ID NO: 183 - protein, 214 aa, Homo sapiens
  cathepsin F mature
APPEWDWRSKGAVTKVKDQGMCGSCWAFSVTGNVEGQWFLNQGTLLSLSEQELLDCDKMDKACMGGLPSNAYSAIKNLGGLETEDDYSYQGHMQSCNFSAEKAKVYINDSVELSQNEQKLAAWLAKRGPISVAINAFGMQFYRHGISRPLRPLCSPWLIDHAVLLVGYGNRSDVPFWAIKNSWGTDWGEKGYYYLHRGSGACGVNTMASSAVVD

SEQ ID NO: 184 - DNA, 2943 bp, Homo sapiens
  cathepsin O
ccgaaagagaaaacaggccgcgcgggcggcagaggagccgggcgccgcaatggacgtgcgggcgctgccgtggctgccgtggctgctgtggctgctgtgccggggcggcggcgatgcggactcccgcgcccccttcaccccgacctggccgcggagccgcgagcgtgaagccgccgccttccgggaaagtcttaatagacatcgatacttgaattctttatttcccagtgaaaactccaccgccttctatggaataaatcagttttcctatttgtttcctgaagagtttaaagccatttatttaagaagcaaaccttccaagtttcccagatactcagcagaagtacatatgtccatccccaatgtgtctttgccgttaagatttgactggagggacaagcaggttgtgacacaagtgagaaaccagcagatgtgtggaggatgctgggccttcagcgtggtgggggcagtggaatctgcttatgcaataaaggggaagcccctggaagacctaagtgtccagcaggtcattgactgttcgtataataattatggctgcaatggaggctctactctcaatgctttgaactggttaaacaagatgcaagtaaaactggtgaaagattcagaatatccttttaaagcacaaaatggtctgtgccattacttttctggttcacattctggattttcaatcaaaggttattctgcatatgacttcagtgaccaagaagatgaaatggcaaaagcacttcttacctttggccctttggtagtcatagtagatgcagtgagctggcaagattatctgggaggcattatacagcatcactgctctagtggagaagcaaatcatgcagttctcataactgggtttgataaaacaggaagcactccatattggattgtgcggaattcctggggaagttcttggggagtagatggttatgcccatgtcaaaatgggaagtaatgtttgtggtattgcagattccgtttcttctatatttgtgtgacatgttgggcagatcaagagacagctacaaaaatgaaggttttcataatgcaatgtaacatagtacttcaaagtattattcaacttcaagtttcagcaactacctacaaaagattctaaggcctagtagtatttaaactaagtttcagaatgttcccttcttgtagagagatggacaaccaaagtcagtgggacaaactccagcacagaagcctgcgaggaagcctatggaatagtttcctgtcctgagacgaaattcagattaggagatattttaggcccctgcaactggggaaggctactgtttgtttttgtttgcttattatttatttgtttgtttattgtgagatatttcaggtgggatcaaagaggtcataagaatttattttcttttgtggggtgtaactactagctttagattacccctatacacaagaatggccaacctaaaattatgtgtgtcttgtacagttagttatattagcagccctctgagatggcgtatctatcggaaggatttcaaacaccaattgctttacctgaacaaatggtgcttaccctttgaacagcagagtgaccacgtagaaggaaggaaaagggcaaaatcgcttcagttaaactgaaattaaatgaacaataaggcaactatataagtaacttctagtagcattgcctgagagacaaattattgtttgataattttcattgtgaataggaatccaatagatcatattgcttactttgttctttttatactatagaataatattttgttctctagtatatcaaaataccaaaatattatctcatattttctccctctttctcttactctttaccaagttttcctggtggcttggcttccctgactaaagaattaagtctcatttttactttccatttctattttcttaccacttggttggctccctttgtctctgtacctttaccaacattaggatctcacctctttcttcctcccttaattcataagcaccactcctatcaaagtcccatctcttaaccctgggtatcaaacaaactgtgagttttccagaatctgtttcccagttttcccctcagctttcctggtctcccatccgaactgcttctttgtgcacctcttgttctttctcttggctcccagtcttgattcctgtgatcactcttgcatcactaattgcacaagtgatttcaggtgcaattctgattagcctgcgtccacacagtgatcgatgatcctatgtgcctagaaaggacactgtgtgctgctcatgacctgcaacaggaaaaaagccatttcttgttagcagtgtaagaaccttagagcaaaggagttgaccttctgattgaatataagcacaaccatattaaatgaatcaatacaagaaaattatttctgatactatgtatgtacatatttcttctctaaaatgtatcattcttttctaatgtatatgatctaacaaaaatgaaacatgaaatgcagtagcaaccactaaaaaaaaaaattcaaggacatctaactttttctctcacttttgccctttgtttatccttccctgtgattagataaacaaaataaaaaacaaaatgctgtatttctcttcttacgccagtcagaaccaatccgaaaagaatgtgtgttgactcaggtttggagttatttcaggaagacagatattgaccttttaattgataaatattcttattatcctggaatgccagaaaagaactatgtcctgcttgtctagtttgtattcgctgactttctatgtgatatagatgcatttgtaatactctttttcaagtgctaaaggatttctaaaatttcaaactgattaatatgtttctgctgttctggattttgatgacatttacaataaaacaacctacatttgactttggtttaaaaagaaaaaaaaaaaa

SEQ ID NO: 185 - protein, 321 aa, Homo sapiens
  cathepsin O precursor
MDVRALPWLPWLLWLLCRGGGDADSRAPFTPTWPRSREREAAAFRESLNRHRYLNSLFPSENSTAFYGINQFSYLFPEEFKAIYLRSKPSKFPRYSAEVHMSIPNVSLPLRFDWRDKQVVTQVRNQQMCGGCWAFSVVGAVESAYAIKGKPLEDLSVQQVIDCSYNNYGCNGGSTLNALNWLNKMQVKLVKDSEYPFKAQNGLCHYFSGSHSGFSIKGYSAYDFSDQEDEMAKALLTFGPLVVIVDAVSWQDYLGGIIQHHCSSGEANHAVLITGFDKTGSTPYWIVRNSWGSSWGVDGYAHVKMGSNVCGIADSVSSIFV

SEQ ID NO: 186 - protein, 214 aa, Homo sapiens
  cathepsin O mature
LPLRFDWRDKQVVTQVRNQQMCGGCWAFSVVGAVESAYAIKGKPLEDLSVQQVIDCSYNNYGCNGGSTLNALNWLNKMQVKLVKDSEYPFKAQNGLCHYFSGSHSGFSIKGYSAYDFSDQEDEMAKALLTFGPLVVIVDAVSWQDYLGGIIQHHCSSGEANHAVLITGFDKTGSTPYWIVRNSWGSSWGVDGYAHVKMGSNVCGIADSVSSIFV

SEQ ID NO: 187 - DNA, 1496 bp, Homo sapiens
  cathepsin V
gctctaagcgcccggggccccgcccagtggccggcacagccaatcgcagcgcgggaaggcggtgggggcggggaaggccgcctggaaacttaaatcccgaggcgggcgaacctgcaccagaccgcggacgtctgtaatctcagaggcttgtttgctgagggtgcctgcgcagctgcgacggctgctggttttgaaacatgaatctttcgctcgtcctggctgccttttgcttgggaatagcctccgctgttccaaaatttgaccaaaatttggatacaaagtggtaccagtggaaggcaacacacagaagattatatggcgcgaatgaagaaggatggaggagagcagtgtgggaaaagaatatgaaaatgattgaactgcacaatggggaatacagccaagggaaacatggcttcacaatggccatgaatgcttttggtgacatgaccaatgaagaattcaggcagatgatgggttgctttcgaaaccagaaattcaggaaggggaaagtgttccgtgagcctctgtttcttgatcttcccaaatctgtggattggagaaagaaaggctacgtgacgccagtgaagaatcagaaacagtgtggttcttgttgggcttttagtgcgactggtgctcttgaaggacagatgttccggaaaactgggaaacttgtctcactgagcgagcagaatctggtggactgttcgcgtcctcaaggcaatcagggctgcaatggtggcttcatggctagggccttccagtatgtcaaggagaacggaggcctggactctgaggaatcctatccatatgtagcagtggatgaaatctgtaagtacagacctgagaattctgttgctaatgacactggcttcacagtggtcgcacctggaaaggagaaggccctgatgaaagcagtcgcaactgtggggcccatctccgttgctatggatgcaggccattcgtccttccagttctacaaatcaggcatttattttgaaccagactgcagcagcaaaaacctggatcatggtgttctggtggttggctacggctttgaaggagcaaattcgaataacagcaagtattggctcgtcaaaaacagctggggtccagaatggggctcgaatggctatgtaaaaatagccaaagacaagaacaaccactgtggaatcgccacagcagccagctaccccaatgtgtgagctgatggatggtgaggaggaaggacttaaggacagcatgtctggggaaattttatcttgaaactgaccaaacgcttattgtgtaagataaaccagttgaatcattgaggatccaagttgagattttaattctgtgacatttttacaagggtaaaatgttaccactactttaattattgttatacacagctttatgatatcaaagactcattgcttaattctaagacttttgaattttcattttttaaaaagatgtacaaaacagtttgaaataaattttaattcgtatataaa

SEQ ID NO: 188 - protein, 334 aa, Homo sapiens
  cathepsin V precursor
MNLSLVLAAFCLGIASAVPKFDQNLDTKWYQWKATHRRLYGANEEGWRRAVWEKNMKMIELHNGEYSQGKHGFTMAMNAFGDMTNEEFRQMMGCFRNQKFRKGKVFREPLFLDLPKSVDWRKKGYVTPVKNQKQCGSCWAFSATGALEGQMFRKTGKLVSLSEQNLVDCSRPQGNQGCNGGFMARAFQYVKENGGLDSEESYPYVAVDEICKYRPENSVANDTGFTVVAPGKEKALMKAVATVGPISVAMDAGHSSFQFYKSGIYFEPDCSSKNLDHGVLVVGYGFEGANSNNSKYWLVKNSWGPEWGSNGYVKIAKDKNNHCGIATAASYPNV

SEQ ID NO: 189 - protein, 221 aa, Homo sapiens
  cathepsin V mature
LPKSVDWRKKGYVTPVKNQKQCGSCWAFSATGALEGQMFRKTGKLVSLSEQNLVDCSRPQGNQGCNGGFMARAFQYVKENGGLDSEESYPYVAVDEICKYRPENSVANDTGFTVVAPGKEKALMKAVATVGPISVAMDAGHSSFQFYKSGIYFEPDCSSKNLDHGVLVVGYGFEGANSNNSKYWLVKNSWGPEWGSNGYVKIAKDKNNHCGIATAASYPNV

SEQ ID NO: 190 - DNA, 2048 bp, Homo sapiens
  legumain
gcacagtggcccttaagcgaggagcggcggcgcccgcagcaatcacagcagtgccgacgtcgtgggtgtttggtgtgaggctgcgagccgccgcgagttctcacggtcccgccggcgccaccaccgcggtcactcaccgccgccgccgccaccactgccaccacggtcgcctgccacaggtgtctgcaattgaactccaaggtgcagaatggtttggaaagtagctgtattcctcagtgtggccctgggcattggtgccgttcctatagatgatcctgaagatggaggcaagcactgggtggtgatcgtggcaggttcaaatggctggtataattataggcaccaggcagacgcgtgccatgcctaccagatcattcaccgcaatgggattcctgacgaacagatcgttgtgatgatgtacgatgacattgcttactctgaagacaatcccactccaggaattgtgatcaacaggcccaatggcacagatgtctatcagggagtcccgaaggactacactggagaggatgttaccccacaaaatttccttgctgtgttgagaggcgatgcagaagcagtgaagggcataggatccggcaaagtcctgaagagtggcccccaggatcacgtgttcatttacttcactgaccatggatctactggaatactggtttttcccaatgaagatcttcatgtaaaggacctgaatgagaccatccattacatgtacaaacacaaaatgtaccgaaagatggtgttctacattgaagcctgtgagtctgggtccatgatgaaccacctgccggataacatcaatgtttatgcaactactgctgccaaccccagagagtcgtcctacgcctgttactatgatgagaagaggtccacgtacctgggggactggtacagcgtcaactggatggaagattcggacgtggaagatctgactaaagagaccctgcacaagcagtaccacctggtaaaatcgcacaccaacaccagccacgtcatgcagtatggaaacaaaacaatctccaccatgaaagtgatgcagtttcagggtatgaaacgcaaagccagttctcccgtccccctacctccagtcacacaccttgacctcacccccagccctgatgtgcctctcaccatcatgaaaaggaaactgatgaacaccaatgatctggaggagtccaggcagctcacggaggagatccagcggcatctggatgccaggcacctcattgagaagtcagtgcgtaagatcgtctccttgctggcagcgtccgaggctgaggtggagcagctcctgtccgagagagccccgctcacggggcacagctgctacccagaggccctgctgcacttccggacccactgcttcaactggcactcccccacgtacgagtatgcgttgagacatttgtacgtgctggtcaacctttgtgagaagccgtatccgcttcacaggataaaattgtccatggaccacgtgtgccttggtcactactgaagagctgcctcctggaagcttttccaagtgtgagcgccccaccgactgtgtgctgatcagagactggagaggtggagtgagaagtctccgctgctcgggccctcctggggagcccccgctccagggctcgctccaggaccttcttcacaagatgacttgctcgctgttacctgcttccccagtcttttctgaaaaactacaaattagggtgggaaaagctctgtattgagaagggtcatatttgctttctaggaggtttgttgttttgcctgttagttttgaggagcaggaagctcatgggggcttctgtagcccctctcaaaaggagtctttattctgagaatttgaagctgaaacctctttaaatcttcagaatgattttattgaagagggccgcaagccccaaatggaaaactgtttttagaaaatatgatgatttttgattgcttttgtatttaattctgcaggtgttcaagtcttaaaaaataaagatttataacagaacccaaaaaaaaaaaaaaaaaaaaaaaaaaaaaaa

SEQ ID NO: 191 - protein, 433 aa, Homo sapiens
  legumain precursor
MVWKVAVFLSVALGIGAVPIDDPEDGGKHWVVIVAGSNGWYNYRHQADACHAYQIIHRNGIPDEQIVVMMYDDIAYSEDNPTPGIVINRPNGTDVYQGVPKDYTGEDVTPQNFLAVLRGDAEAVKGIGSGKVLKSGPQDHVFIYFTDHGSTGILVFPNEDLHVKDLNETIHYMYKHKMYRKMVFYIEACESGSMMNHLPDNINVYATTAANPRESSYACYYDEKRSTYLGDWYSVNWMEDSDVEDLTKETLHKQYHLVKSHTNTSHVMQYGNKTISTMKVMQFQGMKRKASSPVPLPPVTHLDLTPSPDVPLTIMKRKLMNTNDLEESRQLTEEIQRHLDARHLIEKSVRKIVSLLAASEAEVEQLLSERAPLTGHSCYPEALLHFRTHCFNWHSPTYEYALRHLYVLVNLCEKPYPLHRIKLSMDHVCLGHY

SEQ ID NO: 192 - protein, 306 aa, Homo sapiens
  legumain mature
VPIDDPEDGGKHWVVIVAGSNGWYNYRHQADACHAYQIIHRNGIPDEQIVVMMYDDIAYSEDNPTPGIVINRPNGTDVYQGVPKDYTGEDVTPQNFLAVLRGDAEAVKGIGSGKVLKSGPQDHVFIYFTDHGSTGILVFPNEDLHVKDLNETIHYMYKHKMYRKMVFYIEACESGSMMNHLPDNINVYATTAANPRESSYACYYDEKRSTYLGDWYSVNWMEDSDVEDLTKETLHKQYHLVKSHTNTSHVMQYGNKTISTMKVMQFQGMKRKASSPVPLPPVTHLDLTPSPDVPLTIMKRKLMNTN

SEQ ID NO: 193 - DNA, 1501 bp, Homo sapiens
  cathepsin Z
ggggtcggccgggtgctaggccggggccgaggccgaggccggggcgggatccagagcgggagccggcgcgggatctgggactcggagcgggatccggagcgggacccaggagccggcgcggggccatggcgaggcgcgggccagggtggcggccgcttctgctgctcgtgctgctggcgggcgcggcgcagggcggcctctacttccgccggggacagacctgctaccggcctctgcggggggacgggctggctccgctggggcgcagcacatacccccggcctcatgagtacctgtccccagcggatctgcccaagagctgggactggcgcaatgtggatggtgtcaactatgccagcatcacccggaaccagcacatcccccaatactgcggctcctgctgggcccacgccagcaccagcgctatggcggatcggatcaacatcaagaggaagggagcgtggccctccaccctcctgtccgtgcagaacgtcatcgactgcggtaacgctggctcctgtgaagggggtaatgacctgtccgtgtgggactacgcccaccagcacggcatccctgacgagacctgcaacaactaccaggccaaggaccaggagtgtgacaagtttaaccaatgtgggacatgcaatgaattcaaagagtgccacgccatccggaactacaccctctggagggtgggagactacggctccctctctgggagggagaagatgatggcagaaatctacgcaaatggtcccatcagctgtggaataatggcaacagaaagactggctaactacaccggaggcatctatgccgaataccaggacaccacatatataaaccatgtcgtttccgtggctgggtggggcatcagtgatgggactgagtactggattgtccggaattcatggggtgaaccatggggcgagagaggctggctgaggatcgtgaccagcacctataaggatgggaagggcgccagatacaaccttgccatcgaggagcactgtacatttggggaccccatcgtttaaggccatgtcactagaagcgcagtttaagaaaaggcatggtgacccatgaccagaggggatcctatggttatgtgtgccaggctggctggcaggaactggggtggctatcaatattggatggcgaggacagcgtggtactggctgcgagtgttcctgagagttgaaagtgggatgacttatgacacttgcacagcatggctctgcctcacaatgatgcagtcagccacctggtgaagaagtgacctgcaacacaggaaacgatgggacctcagtcttcttcagcagaggacttgatattttgtatttggcaactgtgggcaataatatggcatttaagaggtgaaagagttcagacttatcaccattcttatgtcactttagaatcaagggtgggggagggagggagggagttggcagtttcaaatcgcccaagtgatgaataaagtatctggctctgcacgaga

SEQ ID NO: 194 - protein, 303 aa, Homo sapiens
  cathespin Z precursor
MARRGPGWRPLLLLVLLAGAAQGGLYFRRGQTCYRPLRGDGLAPLGRSTYPRPHEYLSPADLPKSWDWRNVDGVNYASITRNQHIPQYCGSCWAHASTSAMADRINIKRKGAWPSTLLSVQNVIDCGNAGSCEGGNDLSVWDYAHQHGIPDETCNNYQAKDQECDKFNQCGTCNEFKECHAIRNYTLWRVGDYGSLSGREKMMAEIYANGPISCGIMATERLANYTGGIYAEYQDTTYINHVVSVAGWGISDGTEYWIVRNSWGEPWGERGWLRIVTSTYKDGKGARYNLAIEEHCTFGDPIV

SEQ ID NO: 195 - protein, 242 aa, Homo sapiens
  cathepsin Z mature
LPKSWDWRNVDGVNYASITRNQHIPQYCGSCWAHASTSAMADRINIKRKGAWPSTLLSVQNVIDCGNAGSCEGGNDLSVWDYAHQHGIPDETCNNYQAKDQECDKFNQCGTCNEFKECHAIRNYTLWRVGDYGSLSGREKMMAEIYANGPISCGIMATERLANYTGGIYAEYQDTTYINHVVSVAGWGISDGTEYWIVRNSWGEPWGERGWLRIVTSTYKDGKGARYNLAIEEHCTFGDPIV

SEQ ID NO: 196 - DNA, 2654 bp, Homo sapiens
  Lysosomal acid lipase
ttcccggtggctggctgctctgattggctgaacaaatagtccgagggtggtgggcatccgccctcccgacaaggcagaccaggccccctgcaggtcccctatccgcaccccggcccctgagagctggcactgcgactcgagacagcggcccggcaggacagctccagaatgaaaatgcggttcttggggttggtggtctgtttggttctctggaccctgcattctgaggggtctggagggaaactgacagctgtggatcctgaaacaaacatgaatgtgagtgaaattatctcttactggggattccctagtgaggaatacctagttgagacagaagatggatatattctgtgccttaaccgaattcctcatgggaggaagaaccattctgacaaaggtcccaaaccagttgtcttcctgcaacatggcttgctggcagattctagtaactgggtcacaaaccttgccaacagcagcctgggcttcattcttgctgatgctggttttgacgtgtggatgggcaacagcagaggaaatacctggtctcggaaacataagacactctcagtttctcaggatgaattctgggctttcagttatgatgagatggcaaaatatgacctaccagcttccattaacttcattctgaataaaactggccaagaacaagtgtattatgtgggtcattctcaaggcaccactataggttttatagcattttcacagatccctgagctggctaaaaggattaaaatgttttttgccctgggtcctgtggcttccgtcgccttctgtactagccctatggccaaattaggacgattaccagatcatctcattaaggacttatttggagacaaagaatttcttccccagagtgcgtttttgaagtggctgggtacccacgtttgcactcatgtcatactgaaggagctctgtggaaatctctgttttcttctgtgtggatttaatgagagaaatttaaatatgtctagagtggatgtatatacaacacattctcctgctggaacttctgtgcaaaacatgttacactggagccaggctgttaaattccaaaagtttcaagcctttgactggggaagcagtgccaagaattattttcattacaaccagagttatcctcccacatacaatgtgaaggacatgcttgtgccgactgcagtctggagcgggggtcacgactggcttgcagatgtctacgacgtcaatatcttactgactcagatcaccaacttggtgttccatgagagcattccggaatgggagcatcttgacttcatttggggcctggatgccccttggaggctttataataaaattattaatctaatgaggaaatatcagtgaaagctggacttgagctgtgtaccaccaagtcaatgattatgtcatgtgaaaatgtgtttgcttcatttctgtaaaacacttgtttttctttcccaggtcttttgtttttttatatccaagaaaatgataactttgaagatgcccagttcactctagtttcaattagaaacatactagctattttttctttaattagggctggaataggaagccagtgtctcaaccatagtattgtctctttaagtcttttaaatatcactgatgtgtaaaaaggtcattatatccattctgtttttaaaatttaaaatatattgactttttgcccttcataggacaaagtaatatatgtgttggaattttaaaattgtgttgtcattggtaaatctgtcactgacttaagcgaggtataaaagtacgcagttttcatgtccttgccttaaagagctctctagtctaacggtcttgtagttagagatctaaatgacattttatcatgttttcctgcagcaggtgcatagtcaaatccagaaatatcacagctgtgccagtaataaggatgctaacaattaattttatcaaacctaactgtgacagctgtgatttgacacgttttaattgctcaggttaaatgaaatagttttccggcgtcttcaaaaacaaattgcactgataaaacaaaaacaaaagtatgttttaaatgctttgaagactgatacactcaaccatctatattcatgagctctcaatttcatggcaggccatagttctacttatctgagaagcaaatccctgtggagactataccactattttttctgagattaatgtactcttggagcccgctactgtcgttattgatcacatctgtgtgaagccaaagccccgtggttgcccatgagaagtgtccttgttcattttcacccaaatgaagtgtgaacgtgatgttttcggatgcaaactcagctcagggattcattttgtgtcttagttttatatgcatccttatttttaatacacctgcttcacgtccctatgttgggaagtccatatttgtctgcttttcttgcagcatcatttccttacaatactgtccggtggacaaaatgacaattgatatgtttttctgatataattactttagctgcactaacagtacaatgcttgttaatggttaatataggcagggcgaatactactttgtaacttttaaagtcttaaacttttcaataaaattgagtgagacttataggcccaaaaaaaaaaaaaaaaaaaaaaaaaaaaaaaaa

SEQ ID NO: 197 - protein, 399 aa, Homo sapiens
  Lysosomal acid lipase precursor
MKMRFLGLVVCLVLWTLHSEGSGGKLTAVDPETNMNVSEIISYWGFPSEEYLVETEDGYILCLNRIPHGRKNHSDKGPKPVVFLQHGLLADSSNWVTNLANSSLGFILADAGFDVWMGNSRGNTWSRKHKTLSVSQDEFWAFSYDEMAKYDLPASINFILNKTGQEQVYYVGHSQGTTIGFIAFSQIPELAKRIKMFFALGPVASVAFCTSPMAKLGRLPDHLIKDLFGDKEFLPQSAFLKWLGTHVCTHVILKELCGNLCFLLCGFNERNLNMSRVDVYTTHSPAGTSVQNMLHWSQAVKFQKFQAFDWGSSAKNYFHYNQSYPPTYNVKDMLVPTAVWSGGHDWLADVYDVNILLTQITNLVFHESIPEWEHLDFIWGLDAPWRLYNKIINLMRKYQ

SEQ ID NO: 198 - protein, 378 aa, Homo sapiens
  Lysosomal acid lipase maure protein
SGGKLTAVDPETNMNVSEIISYWGFPSEEYLVETEDGYILCLNRIPHGRKNHSDKGPKPVVFLQHGLLADSSNWVTNLANSSLGFILADAGFDVWMGNSRGNTWSRKHKTLSVSQDEFWAFSYDEMAKYDLPASINFILNKTGQEQVYYVGHSQGTTIGFIAFSQIPELAKRIKMFFALGPVASVAFCTSPMAKLGRLPDHLIKDLFGDKEFLPQSAFLKWLGTHVCTHVILKELCGNLCFLLCGFNERNLNMSRVDVYTTHSPAGTSVQNMLHWSQAVKFQKFQAFDWGSSAKNYFHYNQSYPPTYNVKDMLVPTAVWSGGHDWLADVYDVNILLTQITNLVFHESIPEWEHLDFIWGLDAPWRLYNKIINLMRKYQ

SEQ ID NO: 199 - DNA, 1497 bp, Homo sapiens
  gastric lipase
agatgatgcccagatagtaagtctttttggtaatgtaatcagtggatgaggaatctgaccattgttgaaggttttgtatataagaagtcaatacaacattgaccaaaatactaaccagccagagaaacagaatcctaactatttctgaggaaactgcaggtccaaaatgtggctgcttttaacaatggcaagtttgatatctgtactggggactacacatggtttgtttggaaaattacatcctggaagccctgaagtgactatgaacattagtcagatgattacttattggggatacccaaatgaagaatatgaagttgtgactgaagatggttatattcttgaagtcaatagaattccttatgggaagaaaaattcagggaatacaggccagagacctgttgtgtttttgcagcatggtttgcttgcatcagccacaaactggatttccaacctgccgaacaacagccttgccttcattctggcagatgctggttatgatgtgtggctgggcaacagcagaggaaacacctgggccagaagaaacttgtactattcaccagattcagttgaattctgggctttcagctttgatgaaatggctaaatatgaccttccagccacaatcgacttcattgtaaagaaaactggacagaagcagctacactatgttggccattcccagggcaccaccattggttttattgccttttccaccaatcccagcctggctaaaagaatcaaaaccttctatgctctagctcctgttgccactgtgaagtatacaaaaagccttataaacaaacttagatttgttcctcaatccctcttcaagtttatatttggtgacaaaatattctacccacacaacttctttgatcaatttcttgctactgaagtgtgctcccgtgagatgctgaatctcctttgcagcaatgccttatttataatttgtggatttgacagtaagaactttaacacgagtcgcttggatgtgtatctatcacataatccagcaggaacttctgttcaaaacatgttccattggacccaggctgttaagtctgggaaattccaagcttatgactggggaagcccagttcagaataggatgcactatgatcagtcccaacctccctactacaatgtgacagccatgaatgtaccaattgcagtgtggaacggtggcaaggacctgttggctgacccccaagatgttggccttttgcttccaaaactccccaatcttatttaccacaaggagattcctttttacaatcacttggactttatctgggcaatggatgcccctcaagaagtttacaatgacattgtttctatgatatcagaagataaaaagtagttctggatttaaagaattatccgtttgtttttccaaaatactttattctctcatacatagtattttcataatgtttgacatgcagtgcttctttctgtaattttgactttagaaatatattggcatcaacaaac

SEQ ID NO: 200 - protein, 398 aa, Homo sapiens
  gastric lipase precursor
MWLLLTMASLISVLGTTHGLFGKLHPGSPEVTMNISQMITYWGYPNEEYEVVTEDGYILEVNRIPYGKKNSGNTGQRPVVFLQHGLLASATNWISNLPNNSLAFILADAGYDVWLGNSRGNTWARRNLYYSPDSVEFWAFSFDEMAKYDLPATIDFIVKKTGQKQLHYVGHSQGTTIGFIAFSTNPSLAKRIKTFYALAPVATVKYTKSLINKLRFVPQSLFKFIFGDKIFYPHNFFDQFLATEVCSREMLNLLCSNALFIICGFDSKNFNTSRLDVYLSHNPAGTSVQNMFHWTQAVKSGKFQAYDWGSPVQNRMHYDQSQPPYYNVTAMNVPIAVWNGGKDLLADPQDVGLLLPKLPNLIYHKEIPFYNHLDFIWAMDAPQEVYNDIVSMISEDKK

SEQ ID NO: 201 - protein, 379 aa, Homo sapiens
  UNSURE (0)...(0): gastric lipase mature protein
LFGKLHPGSPEVTMNISQMITYWGYPNEEYEVVTEDGYILEVNRIPYGKKNSGNTGQRPVVFLQHGLLASATNWISNLPNNSLAFILADAGYDVWLGNSRGNTWARRNLYYSPDSVEFWAFSFDEMAKYDLPATIDFIVKKTGQKQLHYVGHSQGTTIGFIAFSTNPSLAKRIKTFYALAPVATVKYTKSLINKLRFVPQSLFKFIFGDKIFYPHNFFDQFLATEVCSREMLNLLCSNALFIICGFDSKNFNTSRLDVYLSHNPAGTSVQNMFHWTQAVKSGKFQAYDWGSPVQNRMHYDQSQPPYYNVTAMNVPIAVWNGGKDLLADPQDVGLLLPKLPNLIYHKEIPFYNHLDFIWAMDAPQEVYNDIVSMISEDKK

SEQ ID NO: 202 - DNA, 2764 bp, Homo sapiens
  Lysosomal phospholipase A2
aagcgcgtcgccaccgcccccgcctaggcgagagcccagagagctgaacctgcatcccggacctgcggcgaccgtcgtacaccatgggcctccacctccgcccctaccgtgtggggctgctcccggatggcctcctgttcctcttgctgctgctaatgctgctcgcggacccagcgctcccggccggacgtcaccccccagtggtgctggtccctggtgatttgggtaaccaactggaagccaagctggacaagccgacagtggtgcactacctctgctccaagaagaccgaaagctacttcacaatctggctgaacctggaactgctgctgcctgtcatcattgactgctggattgacaatatcaggctggtttacaacaaaacatccagggccacccagtttcctgatggtgtggatgtacgtgtccctggctttgggaagaccttctcactggagttcctggaccccagcaaaagcagcgtgggttcctatttccacaccatggtggagagccttgtgggctggggctacacacggggtgaggatgtccgaggggctccctatgactggcgccgagccccaaatgaaaacgggccctacttcctggccctccgcgagatgatcgaggagatgtaccagctgtatgggggccccgtggtgctggttgcccacagtatgggcaacatgtacacgctctactttctgcagcggcagccgcaggcctggaaggacaagtatatccgggccttcgtgtcactgggtgcgccctgggggggcgtggccaagaccctgcgcgtcctggcttcaggagacaacaaccggatcccagtcatcgggcccctgaagatccgggagcagcagcggtcagctgtctccaccagctggctgctgccctacaactacacatggtcacctgagaaggtgttcgtgcagacacccacaatcaactacacactgcgggactaccgcaagttcttccaggacatcggctttgaagatggctggctcatgcggcaggacacagaagggctggtggaagccacgatgccacctggcgtgcagctgcactgcctctatggtactggcgtccccacaccagactccttctactatgagagcttccctgaccgtgaccctaaaatctgctttggtgacggcgatggtactgtgaacttgaagagtgccctgcagtgccaggcctggcagagccgccaggagcaccaagtgttgctgcaggagctgccaggcagcgagcacatcgagatgctggccaacgccaccaccctggcctatctgaaacgtgtgctccttgggccctgactcctgtgccacaggactcctgtggctcggccgtggacctgctgttggcctctggggctgtcatggcccacgcgttttgcaaagtttgtgactcaccattcaaggccccgagtcttggactgtgaagcatctgccatggggaagtgctgtttgttatcctttctctgtggcagtgaagaaggaagaaatgagagtctagactcaagggacactggatggcaagaatgctgctgatggtggaactgctgtgaccttaggactggctccacagggtggactggctgggccctggtcccagtccctgcctggggccatgtgtcccccctattcctgtgggcttttcatacttgcctactgggccctggccccgcagccttcctatgagggatgttactgggctgtggtcctgtacccagaggtcccagggatcggctcctggcccctcgggtgacccttcccacacaccagccacagataggcctgccactggtcatgggtagctagagctgctggcttccctgtggcttagctggtggccagcctgactggcttcctgggcgagcctagtagctcctgcaggcaggggcagtttgttgcgttcttcgtggttcccaggccctgggacatctcactccactcctacctcccttaccaccaggagcattcaagctctggattgggcagcagatgtgcccccagtcccgcaggctgtgttccaggggccctgatttcctcggatgtgctattggccccaggactgaagctgcctcccttcaccctgggactgtggttccaaggatgagagcaggggttggagccatggccttctgggaacctatggagaaagggaatccaaggaagcagccaaggctgctcgcagcttccctgagctgcacctcttgctaaccccaccatcacactgccaccctgccctagggtctcactagtaccaagtgggtcagcacagggctgaggatggggctcctatccaccctggccagcacccagcttagtgctgggactagcccagaaacttgaatgggaccctgagagagccaggggtcccctgaggcccccctaggggctttctgtctgccccagggtgctccatggatctccctgtggcagcaggcatggagagtcagggctgccttcatggcagtaggctctaagtgggtgactggccacaggccgagaaaagggtacagcctctaggtggggttcccaaagacgccttcacgctggactgagctgctctcccacagggtttctgtgcagctggattttctctgttgcatacatgcctggcatctgtctccccttgttcctgagtggccccacatggggctctgagcaggctgtatctggattctggcaataaaagtactctggatgctgtaaaaaaaaaaaaaaaaaaaaaaaaaaaaaaaaaaaaaaaaaaa

SEQ ID NO: 203 - protein, 412 aa, Homo sapiens
  Lysosomal phospholipase A2 precursor
MGLHLRPYRVGLLPDGLLFLLLLLMLLADPALPAGRHPPVVLVPGDLGNQLEAKLDKPTVVHYLCSKKTESYFTIWLNLELLLPVIIDCWIDNIRLVYNKTSRATQFPDGVDVRVPGFGKTFSLEFLDPSKSSVGSYFHTMVESLVGWGYTRGEDVRGAPYDWRRAPNENGPYFLALREMIEEMYQLYGGPVVLVAHSMGNMYTLYFLQRQPQAWKDKYIRAFVSLGAPWGGVAKTLRVLASGDNNRIPVIGPLKIREQQRSAVSTSWLLPYNYTWSPEKVFVQTPTINYTLRDYRKFFQDIGFEDGWLMRQDTEGLVEATMPPGVQLHCLYGTGVPTPDSFYYESFPDRDPKICFGDGDGTVNLKSALQCQAWQSRQEHQVLLQELPGSEHIEMLANATTLAYLKRVLLGP

SEQ ID NO: 204 - protein, 379 aa, Homo sapiens
  Lysosomal phospholipase A2 mature protein
AGRHPPVVLVPGDLGNQLEAKLDKPTVVHYLCSKKTESYFTIWLNLELLLPVIIDCWIDNIRLVYNKTSRATQFPDGVDVRVPGFGKTFSLEFLDPSKSSVGSYFHTMVESLVGWGYTRGEDVRGAPYDWRRAPNENGPYFLALREMIEEMYQLYGGPVVLVAHSMGNMYTLYFLQRQPQAWKDKYIRAFVSLGAPWGGVAKTLRVLASGDNNRIPVIGPLKIREQQRSAVSTSWLLPYNYTWSPEKVFVQTPTINYTLRDYRKFFQDIGFEDGWLMRQDTEGLVEATMPPGVQLHCLYGTGVPTPDSFYYESFPDRDPKICFGDGDGTVNLKSALQCQAWQSRQEHQVLLQELPGSEHIEMLANATTLAYLKRVLLGP

SEQ ID NO: 205 - DNA, 2428 bp, Homo sapiens
  Bile salt-activated lipase
accttctgtatcagttaagtgtcaagatggaaggaacagcagtctcaagataatgcaaagagtttattcatccagaggctgatgctcaccatggggcgcctgcaactggttgtgttgggcctcacctgctgctgggcagtggcgagtgccgcgaagctgggcgccgtgtacacagaaggtgggttcgtggaaggcgtcaataagaagctcggcctcctgggtgactctgtggacatcttcaagggcatccccttcgcagctcccaccaaggccctggaaaatcctcagccacatcctggctggcaagggaccctgaaggccaagaacttcaagaagagatgcctgcaggccaccatcacccaggacagcacctacggggatgaagactgcctgtacctcaacatttgggtgccccagggcaggaagcaagtctcccgggacctgcccgttatgatctggatctatggaggcgccttcctcatggggtccggccatggggccaacttcctcaacaactacctgtatgacggcgaggagatcgccacacgcggaaacgtcatcgtggtcaccttcaactaccgtgtcggcccccttgggttcctcagcactggggacgccaatctgccaggtaactatggccttcgggatcagcacatggccattgcttgggtgaagaggaatatcgcggccttcgggggggaccccaacaacatcacgctcttcggggagtctgctggaggtgccagcgtctctctgcagaccctctccccctacaacaagggcctcatccggcgagccatcagccagagcggcgtggccctgagtccctgggtcatccagaaaaacccactcttctgggccaaaaaggtggctgagaaggtgggttgccctgtgggtgatgccgccaggatggcccagtgtctgaaggttactgatccccgagccctgacgctggcctataaggtgccgctggcaggcctggagtaccccatgctgcactatgtgggcttcgtccctgtcattgatggagacttcatccccgctgacccgatcaacctgtacgccaacgccgccgacatcgactatatagcaggcaccaacaacatggacggccacatcttcgccagcatcgacatgcctgccatcaacaagggcaacaagaaagtcacggaggaggacttctacaagctggtcagtgagttcacaatcaccaaggggctcagaggcgccaagacgacctttgatgtctacaccgagtcctgggcccaggacccatcccaggagaataagaagaagactgtggtggactttgagaccgatgtcctcttcctggtgcccaccgagattgccctagcccagcacagagccaatgccaagagtgccaagacctacgcctacctgttttcccatccctctcggatgcccgtctaccccaaatgggtgggggccgaccatgcagatgacattcagtacgttttcgggaagcccttcgccacccccacgggctaccggccccaagacaggacagtctctaaggccatgatcgcctactggaccaactttgccaaaacaggggaccccaacatgggcgactcggctgtgcccacacactgggaaccctacactacggaaaacagcggctacctggagatcaccaagaagatgggcagcagctccatgaagcggagcctgagaaccaacttcctgcgctactggaccctcacctatctggcgctgcccacagtgaccgaccaggaggccacccctgtgccccccacaggggactccgaggccactcccgtgccccccacgggtgactccgagaccgcccccgtgccgcccacgggtgactccggggccccccccgtgccgcccacgggtgactccggggccccccccgtgccgcccacgggtgactccggggccccccccgtgccgcccacgggtgactccggggccccccccgtgccgcccacgggtgactccggggccccccccgtgccgcccacgggtgactccggggccccccccgtgccgcccacgggtgactccggcgccccccccgtgccgcccacgggtgacgccgggcccccccccgtgccgcccacgggtgactccggcgccccccccgtgccgcccacgggtgactccggggccccccccgtgacccccacgggtgactccgagaccgcccccgtgccgcccacgggtgactccggggccccccctgtgccccccacgggtgactctgaggctgcccctgtgccccccacagatgactccaaggaagctcagatgcctgcagtcattaggttttagcgtcccatgagccttggtatcaagaggccacaagagtgggaccccaggggctcccctcccatcttgagctcttcctgaataaagcctcatacccctaaaaaaaaaaaaa

SEQ ID NO: 206 - protein, 745 aa, Homo sapiens
  bile-salt-stimulated lipase precursor
MLTMGRLQLVVLGLTCCWAVASAAKLGAVYTEGGFVEGVNKKLGLLGDSVDIFKGIPFAAPTKALENPQPHPGWQGTLKAKNFKKRCLQATITQDSTYGDEDCLYLNIWVPQGRKQVSRDLPVMIWIYGGAFLMGSGHGANFLNNYLYDGEEIATRGNVIVVTFNYRVGPLGFLSTGDANLPGNYGLRDQHMAIAWVKRNIAAFGGDPNNITLFGESAGGASVSLQTLSPYNKGLIRRAISQSGVALSPWVIQKNPLFWAKKVAEKVGCPVGDAARMAQCLKVTDPRALTLAYKVPLAGLEYPMLHYVGFVPVIDGDFIPADPINLYANAADIDYIAGTNNMDGHIFASIDMPAINKGNKKVTEEDFYKLVSEFTITKGLRGAKTTFDVYTESWAQDPSQENKKKTVVDFETDVLFLVPTEIALAQHRANAKSAKTYAYLFSHPSRMPVYPKWVGADHADDIQYVFGKPFATPTGYRPQDRTVSKAMIAYWTNFAKTGDPNMGDSAVPTHWEPYTTENSGYLEITKKMGSSSMKRSLRTNFLRYWTLTYLALPTVTDQEATPVPPTGDSEATPVPPTGDSETAPVPPTGDSGAPPVPPTGDSGAPPVPPTGDSGAPPVPPTGDSGAPPVPPTGDSGAPPVPPTGDSGAPPVPPTGDSGAPPVPPTGDAGPPPVPPTGDSGAPPVPPTGDSGAPPVTPTGDSETAPVPPTGDSGAPPVPPTGDSEAAPVPPTDDSKEAQMPAVIRF

SEQ ID NO: 207 - protein, 722 aa, Homo sapiens
  Bile salt-activated lipase mature protein
AKLGAVYTEGGFVEGVNKKLGLLGDSVDIFKGIPFAAPTKALENPQPHPGWQGTLKAKNFKKRCLQATITQDSTYGDEDCLYLNIWVPQGRKQVSRDLPVMIWIYGGAFLMGSGHGANFLNNYLYDGEEIATRGNVIVVTFNYRVGPLGFLSTGDANLPGNYGLRDQHMAIAWVKRNIAAFGGDPNNITLFGESAGGASVSLQTLSPYNKGLIRRAISQSGVALSPWVIQKNPLFWAKKVAEKVGCPVGDAARMAQCLKVTDPRALTLAYKVPLAGLEYPMLHYVGFVPVIDGDFIPADPINLYANAADIDYIAGTNNMDGHIFASIDMPAINKGNKKVTEEDFYKLVSEFTITKGLRGAKTTFDVYTESWAQDPSQENKKKTVVDFETDVLFLVPTEIALAQHRANAKSAKTYAYLFSHPSRMPVYPKWVGADHADDIQYVFGKPFATPTGYRPQDRTVSKAMIAYWTNFAKTGDPNMGDSAVPTHWEPYTTENSGYLEITKKMGSSSMKRSLRTNFLRYWTLTYLALPTVTDQEATPVPPTGDSEATPVPPTGDSETAPVPPTGDSGAPPVPPTGDSGAPPVPPTGDSGAPPVPPTGDSGAPPVPPTGDSGAPPVPPTGDSGAPPVPPTGDSGAPPVPPTGDAGPPPVPPTGDSGAPPVPPTGDSGAPPVTPTGDSETAPVPPTGDSGAPPVPPTGDSEAAPVPPTDDSKEAQMPAVIRF

SEQ ID NO: 208 - protein, 334 aa, Bos taurus
  cathepsin L precursor
MNPSFFLTVLCLGVASAAPKLDPNLDAHWHQWKATHRRLYGMNEEEWRRAVWEKNKKIIDLHNQEYSEGKHGFRMAMNAFGDMTNEEFRQVMNGFQNQKHKKGKLFHEPLLVDVPKSVDWTKKGYVTPVKNQGQCGSCWAFSATGALEGQMFRKTGKLVSLSEQNLVDCSRAQGNQGCNGGLMDNAFQYIKDNGGLDSEESYPYLATDTNSCNYKPECSAANDTGFVDIPQREKALMKAVATVGPISVAIDAGHTSFQFYKSGIYYDPDCSSKDLDHGVLVVGYGFEGTDSNNNKFWIVKNSWGPEWGWNGYVKMAKDQNNHCGIATAASYPTV

SEQ ID NO: 209 - protein, 217 aa, Bos taurus
  cathepsin L mature
VDWTKKGYVTPVKNQGQCGSCWAFSATGALEGQMFRKTGKLVSLSEQNLVDCSRAQGNQGCNGGLMDNAFQYIKDNGGLDSEESYPYLATDTNSCNYKPECSAANDTGFVDIPQREKALMKAVATVGPISVAIDAGHTSFQFYKSGIYYDPDCSSKDLDHGVLVVGYGFEGTDSNNNKFWIVKNSWGPEWGWNGYVKMAKDQNNHCGIATAASYPTV

SEQ ID NO: 210 - protein, 333 aa, Canis familiaris
  cathepsin L precursor
MNPSLFLTALCLGIASAAPKFDQSLNAQWYQWKATHRRLYGMNEEGWRRAVWEKNMKMIELHNREYSQGKHGFTMAMNAFGDMTNEEFRQVMNGFQNQKHKKGKMFQEPLFAEIPKSVDWREKGYVTPVKNQGQCGSCWAFSATGALEGQMFRKTGKLVSLSEQNLVDCSRAQGNEGCNGGLMDNAFRYVKDNGGLDSEESYPYLGRDTETCNYKPECSAANDTGFVDLPQREKALMKAVATLGPISVAIDAGHQSFQFYKSGIYFDPDCSSKDLDHGVLVVGYGFEGTDSNNKFWIVKNSWGPEWGWNGYVKMAKDQNNHCGIATAASYPTV

SEQ ID NO: 211 - protein, 216 aa, Canis familiaris
  cathepsin L mature
VDWREKGYVTPVKNQGQCGSCWAFSATGALEGQMFRKTGKLVSLSEQNLVDCSRAQGNEGCNGGLMDNAFRYVKDNGGLDSEESYPYLGRDTETCNYKPECSAANDTGFVDLPQREKALMKAVATLGPISVAIDAGHQSFQFYKSGIYFDPDCSSKDLDHGVLVVGYGFEGTDSNNKFWIVKNSWGPEWGWNGYVKMAKDQNNHCGIATAASYPTV

SEQ ID NO: 212 - protein, 333 aa, Cercopithecus aethiops
  cathepsin L precursor
MNPTFILAALCLGIASATLTFNHSLEAQWTKWKAMHNRLYGMNEEGWRRAVWEKNMKMIELHNQEYSQGKHSFTMAMNTFGDMTSEEFRQVMNGFQNRKPRKGKVFQEPLFYEAPRSVDWREKGYVTPVKNQGQCGSCWAFSATGALEGQMFRKTGKLVSLSEQNLVDCSGPQGNEGCNGGLMDYAFQYVADNGGLDSEESYPYEATEESCKYNPEYSVANDTGFVDIPKQEKALMKAVATVGPISVAIDAGHESFMFYKEGIYFEPDCSSEDMDHGVLVVGYGFESTESDNSKYWLVKNSWGEEWGMGGYIKMAKDRRNHCGIASAASYPTV

SEQ ID NO: 213 - protein, 220 aa, Cercopithecus aethiops
  cathepsin L mature
APRSVDWREKGYVTPVKNQGQCGSCWAFSATGALEGQMFRKTGKLVSLSEQNLVDCSGPQGNEGCNGGLMDYAFQYVADNGGLDSEESYPYEATEESCKYNPEYSVANDTGFVDIPKQEKALMKAVATVGPISVAIDAGHESFMFYKEGIYFEPDCSSEDMDHGVLVVGYGFESTESDNSKYWLVKNSWGEEWGMGGYIKMAKDRRNHCGIASAASYPTV

SEQ ID NO: 214 - protein, 218 aa, Gallus gallus
  cathepsin L proprotein
APRSVDWREKGYVTPVKDQGQCGSCWAFSTTGALEGQHFRTKGKLVSLSEQNLVDCSRPEGNQGCNGGLMDQAFQYVQDNGGIDSEESYPYTAKDDEDCRYKAEYNAANDTGFVDIPQGHERALMKAVASVGPVSVAIDAGHSSFQFYQSGIYYEPDCSSEDLDHGVLVVGYGFEGGKKYWIVKNSWGEKWGDKGYIYMAKDRKNHCGIATAASYPLV

SEQ ID NO: 215 - protein, 334 aa, Mus musculus
  cathepsin L precursor
MNLLLLLAVLCLGTALATPKFDQTFSAEWHQWKSTHRRLYGTNEEEWRRAIWEKNMRMIQLHNGEYSNGQHGFSMEMNAFGDMTNEEFRQVVNGYRHQKHKKGRLFQEPLMLKIPKSVDWREKGCVTPVKNQGQCGSCWAFSASGCLEGQMFLKTGKLISLSEQNLVDCSHAQGNQGCNGGLMDFAFQYIKENGGLDSEESYPYEAKDGSCKYRAEFAVANDTGFVDIPQQEKALMKAVATVGPISVAMDASHPSLQFYSSGIYYEPNCSSKNLDHGVLLVGYGYEGTDSNKNKYWLVKNSWGSEWGMEGYIKIAKDRDNHCGLATAASYPVVN

SEQ ID NO: 216 - protein, 221 aa, Mus musculus
  cathepsin L mature
IPKSVDWREKGCVTPVKNQGQCGSCWAFSASGCLEGQMFLKTGKLISLSEQNLVDCSHAQGNQGCNGGLMDFAFQYIKENGGLDSEESYPYEAKDGSCKYRAEFAVANDTGFVDIPQQEKALMKAVATVGPISVAMDASHPSLQFYSSGIYYEPNCSSKNLDHGVLLVGYGYEGTDSNKNKYWLVKNSWGSEWGMEGYIKIAKDRDNHCGLATAASYPVVN

SEQ ID NO: 217 - protein, 314 aa, Paramecium tetraurelia
  cathepsin L precursor
MMLLGASLYLNNTQEVSDEIDTANLYANWKMKYNRRYTNQRDEMYRYKVFTDNLNYIRAFYESPEEATFTLELNQFADMSQQEFAQTYLSLKVPRTAKLNAANSNFQYKGAEVDWTDNKKVKYPAVKNQGSCGSCWAFSAVGALEINTDIELNRKYELSEQDLVDCSGPYDNDGCNGGWMDSAFEYVADNGLAEAKDYPYTAKDGTCKTSVKRPYTHVQGFKDIDSCDELAQTIQERTVAVAVDANPWQFYRSGVLSKCTKNLNHGVVLVGVQADGAWKIRNSWGSSWGEAGHIRLAGGDTCGICAAPSFPILG

SEQ ID NO: 218 - protein, 205 aa, Paramecium tetraurelia
  cathepsin L mature
GAEVDWTDNKKVKYPAVKNQGSCGSCWAFSAVGALEINTDIELNRKYELSEQDLVDCSGPYDNDGCNGGWMDSAFEYVADNGLAEAKDYPYTAKDGTCKTSVKRPYTHVQGFKDIDSCDELAQTIQERTVAVAVDANPWQFYRSGVLSKCTKNLNHGVVLVGVQADGAWKIRNSWGSSWGEAGHIRLAGGDTCGICAAPSFPILG

SEQ ID NO: 219 - protein, 334 aa, Sus scrofa
  cathepsin L precursor
MKPSLFLTALCLGIASAAPKLDQNLDADWYKWKATHGRLYGMNEEGWRRAVWEKNMKMIELHNQEYSQGKHGFSMAMNAFGDMTNEEFRQVMNGFQNQKHKKGKVFHESLVLEVPKSVDWREKGYVTAVKNQGQCGSCWAFSATGALEGQMFRKTGKLVSLSEQNLVDCSRPQGNQGCNGGLMDNAFQYVKDNGGLDTEESYPYLGRETNSCTYKPECSAANDTGFVDIPQREKALMKAVATVGPISVAIDAGHSSFQFYKSGIYYDPDCSSKDLDHGVLVVGYGFEGTDSNSSKFWIVKNSWGPEWGWNGYVKMAKDQNNHCGISTAASYPTV

SEQ ID NO: 220 - protein, 217 aa, Sus scrofa
  cathepsin L mature
VDWREKGYVTAVKNQGQCGSCWAFSATGALEGQMFRKTGKLVSLSEQNLVDCSRPQGNQGCNGGLMDNAFQYVKDNGGLDTEESYPYLGRETNSCTYKPECSAANDTGFVDIPQREKALMKAVATVGPISVAIDAGHSSFQFYKSGIYYDPDCSSKDLDHGVLVVGYGFEGTDSNSSKFWIVKNSWGPEWGWNGYVKMAKDQNNHCGISTAASYPTV

SEQ ID NO: 221 - protein, 334 aa, Rattus norvegicus
  cathepsin L precursor
MTPLLLLAVLCLGTALATPKFDQTFNAQWHQWKSTHRRLYGTNEEEWRRAVWEKNMRMIQLHNGEYSNGKHGFTMEMNAFGDMTNEEFRQIVNGYRHQKHKKGRLFQEPLMLQIPKTVDWREKGCVTPVKNQGQCGSCWAFSASGCLEGQMFLKTGKLISLSEQNLVDCSHDQGNQGCNGGLMDFAFQYIKENGGLDSEESYPYEAKDGSCKYRAEYAVANDTGFVDIPQQEKALMKAVATVGPISVAMDASHPSLQFYSSGIYYEPNCSSKDLDHGVLVVGYGYEGTDSNKDKYWLVKNSWGKEWGMDGYIKIAKDRNNHCGLATAASYPIVN

SEQ ID NO: 222 - protein, 221 aa, Rattus norvegicus
  cathepsin L mature
IPKTVDWREKGCVTPVKNQGQCGSCWAFSASGCLEGQMFLKTGKLISLSEQNLVDCSHDQGNQGCNGGLMDFAFQYIKENGGLDSEESYPYEAKDGSCKYRAEYAVANDTGFVDIPQQEKALMKAVATVGPISVAMDASHPSLQFYSSGIYYEPNCSSKDLDHGVLVVGYGYEGTDSNKDKYWLVKNSWGKEWGMDGYIKIAKDRNNHCGLATAASYPIVN

SEQ ID NO: 223 - protein, 217 aa, Ovis aries
  cathepsin L mature
VPKSVDWTKKGYVTPVKNQGQCGSCWAFSATGALEGQMFRKTGKLVSLSEQNLVDSSRPQGNQGCNGGLMDNAFQYIKENGGLDSEESYPYEATDTSCNYKPEYSAAKDTGFVDIPQREKALMKAVATVGPISVAIDAGHSSFQFYKSGIYYDPDCSSKDLDHGVLVVGYGFEGTNNKFWIVKNSWGPEWGNKGYVKMAKDQNNHCGIATAASYPTV

SEQ ID NO: 224 - DNA, 6630 bp, Artificial Sequence
  HZ24 with PH20 and DHFR (Gen1/Gen2)
tcaatattggccattagccatattattcattggttatatagcataaatcaatattggctattggccattgcatacgttgtatctatatcataatatgtacatttatattggctcatgtccaatatgaccgccatgttggcattgattattgactagttattaatagtaatcaattacggggtcattagttcatagcccatatatggagttccgcgttacataacttacggtaaatggcccgcctggctgaccgcccaacgacccccgcccattgacgtcaataatgacgtatgttcccatagtaacgccaatagggactttccattgacgtcaatgggtggagtatttacggtaaactgcccacttggcagtacatcaagtgtatcatatgccaagtccgccccctattgacgtcaatgacggtaaatggcccgcctggcattatgcccagtacatgaccttacgggactttcctacttggcagtacatctacgtattagtcatcgctattaccatggtgatgcggttttggcagtacaccaatgggcgtggatagcggtttgactcacggggatttccaagtctccaccccattgacgtcaatgggagtttgttttggcaccaaaatcaacgggactttccaaaatgtcgtaataaccccgccccgttgacgcaaatgggcggtaggcgtgtacggtgggaggtctatataagcagagctcgtttagtgaaccgtcagatcactagaagctttattgcggtagtttatcacagttaaattgctaacgcagtcagtgcttctgacacaacagtctcgaacttaagctgcagaagttggtcgtgaggcactgggcaggtaagtatcaaggttacaagacaggtttaaggagaccaatagaaactgggcttgtcgagacagagaagactcttgcgtttctgataggcacctattggtcttactgacatccactttgcctttctctccacaggtgtccactcccagttcaattacagctcttaaggctagagtacttaatacgactcactataggctagcatgggagtgctaaaattcaagcacatctttttcagaagctttgttaaatcaagtggagtatcccagatagttttcaccttccttctgattccatgttgcttgactctgaatttcagagcacctcctgttattccaaatgtgcctttcctctgggcctggaatgccccaagtgaattttgtcttggaaaatttgatgagccactagatatgagcctcttctctttcataggaagcccccgaataaacgccaccgggcaaggtgttacaatattttatgttgatagacttggctactatccttacatagattcaatcacaggagtaactgtgaatggaggaatcccccagaagatttccttacaagaccatctggacaaagctaagaaagacattacattttatatgccagtagacaatttgggaatggctgttattgactgggaagaatggagacccacttgggcaagaaactggaaacctaaagatgtttacaagaataggtctattgaattggttcagcaacaaaatgtacaacttagtctcacagaggccactgagaaagcaaaacaagaatttgaaaaggcagggaaggatttcctggtagagactataaaattgggaaaattacttcggccaaatcacttgtggggttattatctttttccggattgttacaaccatcactataagaaacccggttacaatggaagttgcttcaatgtagaaataaaaagaaatgatgatctcagctggttgtggaatgaaagcactgctctttacccatccatttatttgaacactcagcagtctcctgtagctgctacactctatgtgcgcaatcgagttcgggaagccatcagagtttccaaaatacctgatgcaaaaagtccacttccggtttttgcatatacccgcatagtttttactgatcaagttttgaaattcctttctcaagatgaacttgtgtatacatttggcgaaactgttgctctgggtgcttctggaattgtaatatggggaaccctcagtataatgcgaagtatgaaatcttgcttgctcctagacaattacatggagactatactgaatccttacataatcaacgtcacactagcagccaaaatgtgtagccaagtgctttgccaggagcaaggagtgtgtataaggaaaaactggaattcaagtgactatcttcacctcaacccagataattttgctattcaacttgagaaaggtggaaagttcacagtacgtggaaaaccgacacttgaagacctggagcaattttctgaaaaattttattgcagctgttatagcaccttgagttgtaaggagaaagctgatgtaaaagacactgatgctgttgatgtgtgtattgctgatggtgtctgtatagatgcttttctaaaacctcccatggagacagaagaacctcaaattttctactgaggatccatagctaacgcccctctccctcccccccccctaacgttactggccgaagccgcttggaataaggccggtgtgcgtttgtctatatgttattttccaccatattgccgtcttttggcaatgtgagggcccggaaacctggccctgtcttcttgacgagcattcctaggggtctttcccctctcgccaaaggaatgcaaggtctgttgaatgtcgtgaaggaagcagttcctctggaagcttcttgaagacaaacaacgtctgtagcgaccctttgcaggcagcggaaccccccacctggcgacaggtgcctctgcggccaaaagccacgtgtataagatacacctgcaaaggcggcacaaccccagtgccacgttgtgagttggatagttgtggaaagagtcaaatggctctcctcaagcgtattcaacaaggggctgaaggatgcccagaaggtaccccattgtatgggatctgatctggggcctcggtgcacatgctttacatgtgtttagtcgaggttaaaaaaacgtctaggccccccgaaccacggggacgtggttttcctttgaaaaacacgatgataagcttgccacaacccacagcggccgctgccatcatggttcgaccattgaactgcatcgtcgccgtgtcccaaaatatggggattggcaagaacggagacctaccctggcctccgctcaggaacgagttcaagtacttccaaagaatgaccacaacctcttcagtggaaggtaaacagaatctggtgattatgggtaggaaaacctggttctccattcctgagaagaatcgacctttaaaggacagaattaatatagttctcagtagagaactcaaagaaccaccacgaggagctcattttcttgccaaaagtttggatgatgccttaagacttattgaacaaccggaattggcaagtaaagtagacatggtttggatagtcggaggcagttctgtttaccaggaagccatgaatcaaccaggccacctcagactctttgtgacaaggatcatgcaggaatttgaaagtgacacgtttttcccagaaattgatttggggaaatataaacttctcccagaatacccaggcgtcctctctgaggtccaggaggaaaaaggcatcaagtataagtttgaagtctacgagaagaaagactaaacgcgtggtacctctagagtcgacccgggcggccgcttcgagcagacatgataagatacattgatgagtttggacaaaccacaactagaatgcagtgaaaaaaatgctttatttgtgaaatttgtgatgctattgctttatttgtaaccattataagctgcaataaacaagttaacaacaacaattgcattcattttatgtttcaggttcagggggagatgtgggaggttttttaaagcaagtaaaacctctacaaatgtggtaaaatcgataaggatccgggctggcgtaatagcgaagaggcccgcaccgatcgcccttcccaacagttgcgcagcctgaatggcgaatggacgcgccctgtagcggcgcattaagcgcggcgggtgtggtggttacgcgcagcgtgaccgctacacttgccagcgccctagcgcccgctcctttcgctttcttcccttcctttctcgccacgttcgccggctttccccgtcaagctctaaatcgggggctccctttagggttccgatttagtgctttacggcacctcgaccccaaaaaacttgattagggtgatggttcacgtagtgggccatcgccctgatagacggtttttcgccctttgacgttggagtccacgttctttaatagtggactcttgttccaaactggaacaacactcaaccctatctcggtctattcttttgatttataagggattttgccgatttcggcctattggttaaaaaatgagctgatttaacaaaaatttaacgcgaattttaacaaaatattaacgcttacaatttcctgatgcggtattttctccttacgcatctgtgcggtatttcacaccgcatatggtgcactctcagtacaatctgctctgatgccgcatagttaagccagccccgacacccgccaacacccgctgacgcgccctgacgggcttgtctgctcccggcatccgcttacagacaagctgtgaccgtctccgggagctgcatgtgtcagaggttttcaccgtcatcaccgaaacgcgcgagacgaaagggcctcgtgatacgcctatttttataggttaatgtcatgataataatggtttcttagacgtcaggtggcacttttcggggaaatgtgcgcggaacccctatttgtttatttttctaaatacattcaaatatgtatccgctcatgagacaataaccctgataaatgcttcaataatattgaaaaaggaagagtatgagtattcaacatttccgtgtcgcccttattcccttttttgcggcattttgccttcctgtttttgctcacccagaaacgctggtgaaagtaaaagatgctgaagatcagttgggtgcacgagtgggttacatcgaactggatctcaacagcggtaagatccttgagagttttcgccccgaagaacgttttccaatgatgagcacttttaaagttctgctatgtggcgcggtattatcccgtattgacgccgggcaagagcaactcggtcgccgcatacactattctcagaatgacttggttgagtactcaccagtcacagaaaagcatcttacggatggcatgacagtaagagaattatgcagtgctgccataaccatgagtgataacactgcggccaacttacttctgacaacgatcggaggaccgaaggagctaaccgcttttttgcacaacatgggggatcatgtaactcgccttgatcgttgggaaccggagctgaatgaagccataccaaacgacgagcgtgacaccacgatgcctgtagcaatggcaacaacgttgcgcaaactattaactggcgaactacttactctagcttcccggcaacaattaatagactggatggaggcggataaagttgcaggaccacttctgcgctcggcccttccggctggctggtttattgctgataaatctggagccggtgagcgtgggtctcgcggtatcattgcagcactggggccagatggtaagccctcccgtatcgtagttatctacacgacggggagtcaggcaactatggatgaacgaaatagacagatcgctgagataggtgcctcactgattaagcattggtaactgtcagaccaagtttactcatatatactttagattgatttaaaacttcatttttaatttaaaaggatctaggtgaagatcctttttgataatctcatgaccaaaatcccttaacgtgagttttcgttccactgagcgtcagaccccgtagaaaagatcaaaggatcttcttgagatcctttttttctgcgcgtaatctgctgcttgcaaacaaaaaaaccaccgctaccagcggtggtttgtttgccggatcaagagctaccaactctttttccgaaggtaactggcttcagcagagcgcagataccaaatactgttcttctagtgtagccgtagttaggccaccacttcaagaactctgtagcaccgcctacatacctcgctctgctaatcctgttaccagtggctgctgccagtggcgataagtcgtgtcttaccgggttggactcaagacgatagttaccggataaggcgcagcggtcgggctgaacggggggttcgtgcacacagcccagcttggagcgaacgacctacaccgaactgagatacctacagcgtgagctatgagaaagcgccacgcttcccgaagggagaaaggcggacaggtatccggtaagcggcagggtcggaacaggagagcgcacgagggagcttccagggggaaacgcctggtatctttatagtcctgtcgggtttcgccacctctgacttgagcgtcgatttttgtgatgctcgtcaggggggcggagcctatggaaaaacgccagcaacgcggcctttttacggttcctggccttttgctggccttttgctcacatggctcgacagatct

SEQ ID NO: 225 - protein, 482 aa, Homo sapiens
  precursor soluble rHuPH20
MGVLKFKHIFFRSFVKSSGVSQIVFTFLLIPCCLTLNFRAPPVIPNVPFLWAWNAPSEFCLGKFDEPLDMSLFSFIGSPRINATGQGVTIFYVDRLGYYPYIDSITGVTVNGGIPQKISLQDHLDKAKKDITFYMPVDNLGMAVIDWEEWRPTWARNWKPKDVYKNRSIELVQQQNVQLSLTEATEKAKQEFEKAGKDFLVETIKLGKLLRPNHLWGYYLFPDCYNHHYKKPGYNGSCFNVEIKRNDDLSWLWNESTALYPSIYLNTQQSPVAATLYVRNRVREAIRVSKIPDAKSPLPVFAYTRIVFTDQVLKFLSQDELVYTFGETVALGASGIVIWGTLSIMRSMKSCLLLDNYMETILNPYIINVTLAAKMCSQVLCQEQGVCIRKNWNSSDYLHLNPDNFAIQLEKGGKFTVRGKPTLEDLEQFSEKFYCSCYSTLSCKEKADVKDTDAVDVCIADGVCIDAFLKPPMETEEPQIFY

SEQ ID NO: 226 - protein, 447 aa, Homo sapiens [sequence omitted]

SEQ ID NO: 227 - protein, 446 aa, Homo sapiens
  soluble rHuPH20 1-446
LNFRAPPVIPNVPFLWAWNAPSEFCLGKFDEPLDMSLFSFIGSPRINATGQGVTIFYVDRLGYYPYIDSITGVTVNGGIPQKISLQDHLDKAKKDITFYMPVDNLGMAVIDWEEWRPTWARNWKPKDVYKNRSIELVQQQNVQLSLTEATEKAKQEFEKAGKDFLVETIKLGKLLRPNHLWGYYLFPDCYNHHYKKPGYNGSCFNVEIKRNDDLSWLWNESTALYPSIYLNTQQSPVAATLYVRNRVREAIRVSKIPDAKSPLPVFAYTRIVFTDQVLKFLSQDELVYTFGETVALGASGIVIWGTLSIMRSMKSCLLLDNYMETILNPYIINVTLAAKMCSQVLCQEQGVCIRKNWNSSDYLHLNPDNFAIQLEKGGKFTVRGKPTLEDLEQFSEKFYCSCYSTLSCKEKADVKDTDAVDVCIADGVCIDAFLKPPMETEEPQIF

SEQ ID NO: 228 - protein, 445 aa, Homo sapiens
  soluble rHuPH20 1-445
LNFRAPPVIPNVPFLWAWNAPSEFCLGKFDEPLDMSLFSFIGSPRINATGQGVTIFYVDRLGYYPYIDSITGVTVNGGIPQKISLQDHLDKAKKDITFYMPVDNLGMAVIDWEEWRPTWARNWKPKDVYKNRSIELVQQQNVQLSLTEATEKAKQEFEKAGKDFLVETIKLGKLLRPNHLWGYYLFPDCYNHHYKKPGYNGSCFNVEIKRNDDLSWLWNESTALYPSIYLNTQQSPVAATLYVRNRVREAIRVSKIPDAKSPLPVFAYTRIVFTDQVLKFLSQDELVYTFGETVALGASGIVIWGTLSIMRSMKSCLLLDNYMETILNPYIINVTLAAKMCSQVLCQEQGVCIRKNWNSSDYLHLNPDNFAIQLEKGGKFTVRGKPTLEDLEQFSEKFYCSCYSTLSCKEKADVKDTDAVDVCIADGVCIDAFLKPPMETEEPQI

SEQ ID NO: 229 - protein, 444 aa, Homo sapiens
  soluble rHuPH20 1-444
LNFRAPPVIPNVPFLWAWNAPSEFCLGKFDEPLDMSLFSFIGSPRINATGQGVTIFYVDRLGYYPYIDSITGVTVNGGIPQKISLQDHLDKAKKDITFYMPVDNLGMAVIDWEEWRPTWARNWKPKDVYKNRSIELVQQQNVQLSLTEATEKAKQEFEKAGKDFLVETIKLGKLLRPNHLWGYYLFPDCYNHHYKKPGYNGSCFNVEIKRNDDLSWLWNESTALYPSIYLNTQQSPVAATLYVRNRVREAIRVSKIPDAKSPLPVFAYTRIVFTDQVLKFLSQDELVYTFGETVALGASGIVIWGTLSIMRSMKSCLLLDNYMETILNPYIINVTLAAKMCSQVLCQEQGVCIRKNWNSSDYLHLNPDNFAIQLEKGGKFTVRGKPTLEDLEQFSEKFYCSCYSTLSCKEKADVKDTDAVDVCIADGVCIDAFLKPPMETEEPQ

SEQ ID NO: 230 - protein, 443 aa, Homo sapiens
  soluble rHuPH20 1-443
LNFRAPPVIPNVPFLWAWNAPSEFCLGKFDEPLDMSLFSFIGSPRINATGQGVTIFYVDRLGYYPYIDSITGVTVNGGIPQKISLQDHLDKAKKDITFYMPVDNLGMAVIDWEEWRPTWARNWKPKDVYKNRSIELVQQQNVQLSLTEATEKAKQEFEKAGKDFLVETIKLGKLLRPNHLWGYYLFPDCYNHHYKKPGYNGSCFNVEIKRNDDLSWLWNESTALYPSIYLNTQQSPVAATLYVRNRVREAIRVSKIPDAKSPLPVFAYTRIVFTDQVLKFLSQDELVYTFGETVALGASGIVIWGTLSIMRSMKSCLLLDNYMETILNPYIINVTLAAKMCSQVLCQEQGVCIRKNWNSSDYLHLNPDNFAIQLEKGGKFTVRGKPTLEDLEQFSEKFYCSCYSTLSCKEKADVKDTDAVDVCIADGVCIDAFLKPPMETEEP

SEQ ID NO: 231 - protein, 442 aa, Homo sapiens
  soluble rHuPH20 1-442
LNFRAPPVIPNVPFLWAWNAPSEFCLGKFDEPLDMSLFSFIGSPRINATGQGVTIFYVDRLGYYPYIDSITGVTVNGGIPQKISLQDHLDKAKKDITFYMPVDNLGMAVIDWEEWRPTWARNWKPKDVYKNRSIELVQQQNVQLSLTEATEKAKQEFEKAGKDFLVETIKLGKLLRPNHLWGYYLFPDCYNHHYKKPGYNGSCFNVEIKRNDDLSWLWNESTALYPSIYLNTQQSPVAATLYVRNRVREAIRVSKIPDAKSPLPVFAYTRIVFTDQVLKFLSQDELVYTFGETVALGASGIVIWGTLSIMRSMKSCLLLDNYMETILNPYIINVTLAAKMCSQVLCQEQGVCIRKNWNSSDYLHLNPDNFAIQLEKGGKFTVRGKPTLEDLEQFSEKFYCSCYSTLSCKEKADVKDTDAVDVCIADGVCIDAFLKPPMETEE

SEQ ID NO: 232 - protein, 509 aa, Homo sapiens
  precursor PH20
MGVLKFKHIFFRSFVKSSGVSQIVFTFLLIPCCLTLNFRAPPVIPNVPFLWAWNAPSEFCLGKFDEPLDMSLFSFIGSPRINATGQGVTIFYVDRLGYYPYIDSITGVTVNGGIPQKISLQDHLDKAKKDITFYMPVDNLGMAVIDWEEWRPTWARNWKPKDVYKNRSIELVQQQNVQLSLTEATEKAKQEFEKAGKDFLVETIKLGKLLRPNHLWGYYLFPDCYNHHYKKPGYNGSCFNVEIKRNDDLSWLWNESTALYPSIYLNTQQSPVAATLYVRNRVREAIRVSKIPDAKSPLPVFAYTRIVFTDQVLKFLSQDELVYTFGETVALGASGIVIWGTLSIMRSMKSCLLLDNYMETILNPYIINVTLAAKMCSQVLCQEQGVCIRKNWNSSDYLHLNPDNFAIQLEKGGKFTVRGKPTLEDLEQFSEKFYCSCYSTLSCKEKADVKDTDAVDVCIADGVCIDAFLKPPMETEEPQIFYNASPSTLSATMFIVSILFLIISSVASL

SEQ ID NO: 233 - protein, 474 aa, Homo sapiens
  mature PH20
LNFRAPPVIPNVPFLWAWNAPSEFCLGKFDEPLDMSLFSFIGSPRINATGQGVTIFYVDRLGYYPYIDSITGVTVNGGIPQKISLQDHLDKAKKDITFYMPVDNLGMAVIDWEEWRPTWARNWKPKDVYKNRSIELVQQQNVQLSLTEATEKAKQEFEKAGKDFLVETIKLGKLLRPNHLWGYYLFPDCYNHHYKKPGYNGSCFNVEIKRNDDLSWLWNESTALYPSIYLNTQQSPVAATLYVRNRVREAIRVSKIPDAKSPLPVFAYTRIVFTDQVLKFLSQDELVYTFGETVALGASGIVIWGTLSIMRSMKSCLLLDNYMETILNPYIINVTLAAKMCSQVLCQEQGVCIRKNWNSSDYLHLNPDNFAIQLEKGGKFTVRGKPTLEDLEQFSEKFYCSCYSTLSCKEKADVKDTDAVDVCIADGVCIDAFLKPPMETEEPQIFYNASPSTLSATMFIVSILFLIISSVASL

SEQ ID NO: 234 - protein, 333 aa, Homo sapiens [sequence omitted]

SEQ ID NO: 235 - protein, 5 aa, Artificial Sequence
  6 x His tag
HHHHH

SEQ ID NO: 236 - protein, 8 aa, Artificial Sequence
  Flag Tag
DYKDDDDK

SEQ ID NO: 237 - protein, 450 aa, Bos taurus
  hyaluronidase
MRPFSLEVSLHLPWAMAAHLLPVCTLFLNLLSMTQGSRDPVVPNQPFTTIWNANTEWCMKKHGVDVDISIFDVVTNPGQTFRGPNMTIFYSSQLGTYPYYTSAGEPVFGGLPQNASLNAHLARTFQDILAAMPEPRFSGLAVIDWEAWRPRWAFNWDTKDIYRQRSRALVQKQHPDWLAPRVEAAAQDQFEGAAEEWMAGTLKLGQALRPQGLWGFYNFPECYNYDFKSPNYTGRCPLNICAQNDQLGWLWGQSRALYPSIYLPAALEGTKKTQMFVQHRVAEAFRVAAGAGDPKLPVLPYMQLFYDMTNHFLPAEELEHSLGESAAQGAAGVVLWVSWLSTSTKESCQAIKEYVDTTLGPSILNVTSGARLCSQVLCSGHGRCARRPSYPKARLILNSTSFSIKPTPGGGPLTLQGALSLEDRLRMAVEFECRCYRGWRGTRCEQWGMW

SEQ ID NO: 238 - protein, 331 aa, Vespula vulgaris
  hyaluronidase A
SERPKRVFNIYWNVPTFMCHQYDLYFDEVTNFNIKRNSKDDFQGDKIAIFYDPGEFPALLSLKDGKYKKRNGGVPQEGNITIHLQKFIENLDKIYPNRNFSGIGVIDFERWRPIFRQNWGNMKIHKNFSIDLVRNEHPTWNKKMIELEASKRFEKYARFFMEETLKLAKKTRKQADWGYYGYPYCFNMSPNNLVPECDVTAMHENDKMSWLFNNQNVLLPSVYVRQELTPDQRIGLVQGRVKEAVRISNNLKHSPKVLSYWWYVYQDETNTFLTETDVKKTFQEIVINGGDGIIIWGSSSDVNSLSKCKRLQDYLLTVLGPIAINVTEAVN

SEQ ID NO: 239 - protein, 340 aa, Vespula vulgaris
  hyaluronidase B
DRTIWPKKGFSIYWNIPTHFCHNFGVYFKELKQFNIKYNSMNNFRGETISLFYDPGNFPSMVLLKNGTYEIRNEGVPQKGNLTIHLEQFTKELDEIYPKKIAGGIGVIHFHNWRPIFRRNVDNLKINKDISIDLVRKEHPKWDKSMIEKEASNRFETSAKIFMEKTLKLAKEIRKKTEWGYHGYPHCLSGSTDKPSFDCDALSMSENDKMSWLFNNQNVLLPSIYLKNVLKPDEKIHLVQERLKEAIRISKNFKHLPKVLPYWWYTYQDKESIFLTEADVKNTFKEILTNGADGIIIWGVSYELTDRKRCEKLKEYLMKILGPIAFKVTKAVKENTPLNF

SEQ ID NO: 240 - protein, 382 aa, Apis mellifera
  hyaluronidase
MSRPLVITEGMMIGVLLMLAPINALLLGFVQSTPDNNKTVREFNVYWNVPTFMCHKYGLRFEEVSEKYGILQNWMDKFRGEEIAILYDPGMFPALLKDPNGNVVARNGGVPQLGNLTKHLQVFRDHLINQIPDKSFPGVGVIDFESWRPIFRQNWASLQPYKKLSVEVVRREHPFWDDQRVEQEAKRRFEKYGQLFMEETLKAAKRMRPAANWGYYAYPYCYNLTPNQPSAQCEATTMQENDKMSWLFESEDVLLPSVYLRWNLTSGERVGLVGGRVKEALRIARQMTTSRKKVLPYYWYKYQDRRDTDLSRADLEATLRKITDLGADGFIIWGSSDDINTKAKCLQFREYLNNELGPAVKRIALNNNANDRLTVDVSVDQV

SEQ ID NO: 241 - protein, 331 aa, Dolichovespula maculata
  hyaluronidase
SERPKRVFNIYWNVPTFMCHQYGLYFDEVTNFNIKHNSKDDFQGDKISIFYDPGEFPALLPLKEGNYKIRNGGVPQEGNITIHLQRFIENLDKTYPNRNFNGIGVIDFERWRPIFRQNWGNMMIHKKFSIDLVRNEHPFWDKKMIELEASKRFEKYARLFMEETLKLAKKTRKQADWGYYGYPYCFNMSPNNLVPDCDATAMLENDKMSWLFNNQNVLLPSVYIRHELTPDQRVGLVQGRVKEAVRISNNLKHSPKVLSYWWYVYQDDTNTFLTETDVKKTFQEIAINGGDGIIIWGSSSDVNSLSKCKRLREYLLTVLGPITVNVTETVN

SEQ ID NO: 242 - protein, 367 aa, Polistes annularis
  hyaluronidase
YVSLSPDSVFNIITDDISHQILSRSNCERSKRPKRVFSIYWNVPTFMCHQYGMNFDEVTDFNIKHNSKDNFRGETISIYYDPGKFPALMPLKNGNYEERNGGVPQRGNITIHLQQFNEDLDKMTPDKNFGGIGVIDFERWKPIFRQNWGNTEIHKKYSIELVRKEHPKWSESMIEAEATKKFEKYARYFMEETLKLAKKTRKRAKWGYYGFPYCYNVTPNNPGPDCDAKATIENDRLSWMYNNQEILFPSVYVRHEQKPEERVYLVQGRIKEAVRISNNLEHSPSVLAYWWYVYQDKMDIYLSETDVEKTFQEIVTNGGDGIIIWGSSSDVNSLSKCKRLREYLLNTLGPFAVNVTETVNGRSSLNF

SEQ ID NO: 243 - protein, 462 aa, Mus musculus
  hyaluronidase
MLGLTQHAQKVWRMKPFSPEVSPGSSPATAGHLLRISTLFLTLLELAQVCRGSVVSNRPFITVWNGDTHWCLTEYGVDVDVSVFDVVANKEQSFQGSNMTIFYREELGTYPYYTPTGEPVFGGLPQNASLVTHLAHTFQDIKAAMPEPDFSGLAVIDWEAWRPRWAFNWDSKDIYRQRSMELVQAEHPDWPETLVEAAAKNQFQEAAEAWMAGTLQLGQVLRPRGLWGYYGFPDCYNNDFLSLNYTGQCPVFVRDQNDQLGWLWNQSYALYPSIYLPAALMGTGKSQMYVRHRVQEALRVAIVSRDPHVPVMPYVQIFYEMTDYLLPLEELEHSLGESAAQGVAGAVLWLSSDKTSTKESCQAIKAYMDSTLGPFIVNVTSAALLCSEALCSGHGRCVRHPSYPEALLTLNPASFSIELTHDGRPPSLKGTLSLKDRAQMAMKFRCRCYRGWRGKWCDKRGM

SEQ ID NO: 244 - protein, 473 aa, Mus musculus
  Hyaluronidase 2
MRAGLGPIITLALVLEVAWAGELKPTAPPIFTGRPFVVAWNVPTQECAPRHKVPLDLRAFDVKATPNEGFFNQNITTFYYDRLGLYPRFDAAGTSVHGGVPQNGSLCAHLPMLKESVERYIQTQEPGGLAVIDWEEWRPVWVRNWQEKDVYRQSSRQLVASRHPDWPSDRVMKQAQYEFEFAARQFMLNTLRYVKAVRPQHLWGFYLFPDCYNHDYVQNWESYTGRCPDVEVARNDQLAWLWAESTALFPSVYLDETLASSVHSRNFVSFRVREALRVAHTHHANHALPVYVFTRPTYTRGLTGLSQVDLISTIGESAALGSAGVIFWGDSEDASSMETCQYLKNYLTQLLVPYIVNVSWATQYCSWTQCHGHGRCVRRNPSANTFLHLNASSFRLVPGHTPSEPQLRPEGQLSEADLNYLQKHFRCQCYLGWGGEQCQRNYKGAAGNASRAWAGSHLTSLLGLVAVALTWTL

SEQ ID NO: 245 - protein, 412 aa, Mus musculus
  hyaluronidase 3
MIMHLGLMMVVGLTLCLMHGQALLQVPEHPFSVVWNVPSARCKAHFGVHLPLDALGIVANHGQHFHGQNISIFYKNQFGLYPYFGPRGTAHNGGIPQAVSLDHHLARAAHQILHSLGSSFAGLAVLDWEEWYPLWAGNWGPHRQVYLAASWVWTQQMFPGLDPQEQLHKAHTSFEQAARALMEYTLQLGRTLRPSGLWGFYRYPACGNGWHKMASNYTGHCHAAITTQNTQLRWLWAASSALFPSIYLPPRLPLAYRQAFVRHRLEEAFRVALLEHSHPLPVLAYSRLTHRSSGRFLSLDDLMQTIGVSAALGTAGVVLWGDLSFSSSEEKCWRLHDYLVGTLGPYVINVTKADMACSHQRCHGHGRCARKDPGQMEAFLHLQPDDSLGAWNSFRCHCYSGWAGPTCLEPKP

SEQ ID NO: 246 - protein, 435 aa, Sus scrofa
  hyalauronidase
MAAHLLPICTLFLNLLSVAQGSRDPVVLNRPFTTIWNANTQWCLKRHGVDVDVSVFEVVVNPGQTFRGPNMTIFYSSQLGTYPYYTSAGEPVFGGLPQNASLDVHLNRTFKDILAAMPESNFSGLAVIDWEAWRPRWAFNWDAKDIYRQRSRALVQKQHPDWPAPWVEAAAQDQFQEAAQTWMAGTLKLGQTLRPHGLWGFYGFPDCYNYDFQSSNYTGQCPPGVSAQNDQLGWLWGQSRALYPSIYLPSALEGTNKTQLYVQHRVNEAFRVAAAAGDPNLPVLPYAQIFHDMTNRLLSREELEHSLGESAAQGAAGVVLWVSWENTRTKESCQSIKEYVDTTLGPFILNVTSGALLCSQAVCSGHGRCVRRPSHTEALPILNPSSFSIKPTPGGGPLTLQGALSLKDRVQMAEEFQCRCYPGWRGTWCEQQGTR

SEQ ID NO: 247 - protein, 419 aa, Sus scrofa
  hyaluronidase 3
MTMQLGLALVLGVAMCLGCGQPLLRAPERPFCVLWNVPSARCKARFGVHLPLEALGITANHGQRFHGQNITIFYKSQLGLYPYFGPRGTAHNGGIPQAVSLDHHLARAAYQIHRSLRPGFTGLAVLDWEEWCPLWAGNWGRRQAYQAASCAWAQRVYPNLDPQEQLCKARAGFEEAARALMEDTLRLGRMLRPHGLWGFYHYPACGNGWHGTASNYTGHCHAAALARNTQLYWLWAASSALFPSIYLPPGLPPAYHQAFVRYRLEEAFRVALVGHPHPLPVLAYARLTHRNSGRFLSQDELVQTIGVSAALGASGVVLWGDLSFSSSEEECWHLRGYLVGTLGPYVINVTRAAMACSHQRCHGHGRCAWQDPGQLKVFLHLHPGGSPGAWESFSCRCYWGWAGPTCQEPRPELGPEEAT

SEQ ID NO: 248 - protein, 449 aa, Rattus norvegicus
  hyaluronidase 1
MKPFSPEVSPDPCPATAAHLLRTYTLFLTLLELAQGCRGSMVSNRPFITVWNADTHWCLKDHGVDVDVSVFDVVANKEQNFQGPNMTIFYREELGTYPYYTPTGEPVFGGLPQNASLVTHLAHAFQDIKAAMPEPDFSGLAVIDWEAWRPRWAFNWDSKDIYQQRSMELVRAEHPDWPETLVEAEAQGQFQEAAEAWMAGTLQLGQVLRPRGLWGYYGFPDCYNYDFLSPNYTGQCSLSIHDQNDQLGWLWNQSYALYPSIYLPAALMGTGKSQMYVRYRVQEAFRLALVSRDPHVPIMPYVQIFYEKTDYLLPLEELEHSLGESAAQGAAGAVLWISSEKTSTKESCQAIKAYMDSTLGPFILNVTSAALLCSEALCSGRGRCVRHPSYPEALLTLSPASFSIEPTHDGRPLSLKGTLSLKDRAQMAMKFKCRCYRGWSGEWCKKQDM

SEQ ID NO: 249 - protein, 473 aa, Rattus norvegicus
  hyaluronidase 2
MRAGLGPIITLALVLEVAWASELKPTAPPIFTGRPFVVAWNVPTQECAPRHKVPLDLRAFDVEATPNEGFFNQNITTFYYDRLGLYPRFDAAGMSVHGGVPQNGSLCAHLPMLKEAVERYIQTQEPAGLAVIDWEEWRPVWVRNWQEKDVYRQSSRQLVASRHPDWPSDRIVKQAQYEFEFAARQFMLNTLRYVKAVRPQHLWGFYLFPDCYNHDYVQNWDSYTGRCPDVEVAQNDQLAWLWAENTALFPSVYLDKTLASSKHSRNFVSFRVQEALRVAHTHHANHALPVYVFTRPTYTRRLTELNQMDLISTIGESAALGSAGVIFWGDSVYASSMENCQNLKKYLTQTLVPYIVNVSWATQYCSWTQCHGHGRCVRRNPSASTFLHLSPSSFRLVPGRTPSEPQLRPEGELSEDDLSYLQMHFRCHCYLGWGGEQCQWNHKRAAGDASRAWAGAHLASLLGLVAMTLTWTL

SEQ ID NO: 250 - protein, 412 aa, Rattus norvegicus
  hyaluronidase 3
MITQLGLTLVVGLTLCLVHVQALLQVPEFPFSVLWNVPSARCKTRFGVHLPLDALGIIANHGQRFHGQNITIFYKNQFGLYPYFGPRGTAHNGGIPQAVSLDHHLAQAAHQILHNLGSSFAGLAVLDWEEWYPLWAGNWGTHRQVYQAASWAWAQQMFPDLNPQEQLHKAQTGFEQAARALMEHTLRLGQMLRPHGLWGFYRYPVCGNGWHNMASNYTGHCHPAIITRNTQLRWLWAASSALFPSIYLPPRLPPAYHQTFVRHRLEEAFRVALTGHAHPLPVLAYVRLTHRSSGRFLSLDDLMQTIGVSAALGAAGVVLWGDLSVSSSEEECWRLHDYLVGTLGPYVINVTKAATACSHQRCHGHGRCSWKDPGQMEAFLHLQPDDNLGAWKSFRCRCYLGWSGPTCLEPKP

SEQ ID NO: 251 - protein, 545 aa, Oryctolagus cuniculus
  PH20
MGVLKFKHIFFGSAVELSGVFQIVFIFLLIPCCLTANFRAPPVIPNVPFLWAWNAPTEFCLGKSGEPLDMSLFSLFGSPRKNKTGQGITIFYVDRLGYYPYIDPHTGAIVHGRIPQLGPLQQHLTKLRQEILYYMPKDNVGLAVIDWEEWLPTWLRNWKPKDIYRIKSIELVKSQHPQYNHSYATEKAKRDFEKAGKDFMEETLKLGRLLRPNHLWGYYLFPDCYNHHYDKPNLYKGSCFDIEKKRNDDLSWLWKESTALFPSVYLTSRARSATALSKLYVVRNRVHEAIRVSKIPDDKSPLPNFVYTRLVFTDQIFQFLSHHDLVYTIGEIVALGASGIVVWGSQSLARSMKSCLHLDNYMKTILNPYLINVTLAAKMCNQVLCQEQGVCTRKNWNPNDYLHLNPGNFAIQLGSNGTYKVDGKPTLTDLEQFSKNFQCSCYTNLNCKERTDMNNVRTVNVCAVENVCIDTNVGPQAVTYAPKEKKDVAHILSNTTSINSSTTMSLPFPRKHVSGCLLVLCMYSQYLNICYRLVAIGIQHGYYLK

SEQ ID NO: 252 - protein, 476 aa, Ovis aries
  hyaluronidase 2
MWTGLGPAVTLALVLVVAWATELKPTAPPIFTGRPFVVAWDVPTQDCGPRHKMPLDPKDMKAFDVQASPNEGFVNQNITIFYRDRLGMYPHFNSVGRSVHGGVPQNGSLWVHLEMLKGHVEHYIRTQEPAGLAVIDWEDWRPVWVRNWQDKDVYRRLSRQLVASHHPDWPPERIVKEAQYEFEFAARQFMLETLRFVKAFRPRHLWGFYLFPDCYNHDYVQNWETYTGRCPDVEVSRNDQLSWLWAESTALFPSVYLEETLASSTHGRNFVSFRVQEALRVADVHHANHALPVYVFTRPTYSRGLTGLSEMDLISTIGESAALGAAGVILWGDAGFTTSNETCRRLKDYLTRSLVPYVVNVSWAAQYCSWAQCHGHGRCVRRDPNAHTFLHLSASSFRLVPSHAPDEPRLRPEGELSWADRNHLQTHFRCQCYLGWGGEQCQWDRRRAAGGASGAWAGSHLTGLLAVAVLAFTWTS

SEQ ID NO: 253 - protein, 414 aa, Pongo pygmaeus
  hyaluronidase 3
MTTRLGPALVLGVALCLGCGQPLPQVPERPFSVLWNVPSAHCKSRFGVHLPLNALGIIANRGQHFHGQNMTIFYKNQLGLYPYFGPKGTAHNGGIPQALPLDRHLALAAYQIHHSLRPGFAGPAVLDWEEWCPLWAGNWGRRRAYQAASWAWAQQVFPDLDPQEQLYKAYTGFEQAARALMEDTLRVAQALRPHGLWGFYHYPACGNGWHSMASNYTGRCHAATLARNTQLHWLWAASSALFPSIYLPPRLPPAHHQAFVRHRLEEAFRVALVGHLPVLAYVRLTHRRSGRFLSQDDLVQTIGVSAALGAAGVVLWGDLSLSSSEEECWHLHDYLVDTLGPYGINVTRAAMACSHQRCHGHGRCARRDPGQMEAFLHLWPDGSLGDWKSFSCHCYWGWAGPTCQEPRLGPKEAV

SEQ ID NO: 254 - protein, 510 aa, Macaca fascicularis
  PH20
MGVLKFKHIFFRSFVKSSGVSQIVFTFLLIPCCLTLNFRAPPIIPNVPFLWAWNAPSEFCLGKFNEPLDMSLFTLMGSPRINVTGQGVTIFYVDRLGYYPYIDLTTGVTVHGGIPQKVSLQDHLDKSKQDILFYMPVDNLGMAVIDWEEWRPTWARNWKPKDVYKNRSIELVQQQNVQLSLPQATDKAKQEFEKAGKDFMLETIKLGRSLRPNHLWGYYLFPDCYNHHYRKPGYNGSCFDVEIKRNDDLSWLWNESTALYPSIYLNTQQSVVVATLYVRNRVREAIRVSKIPDAKNPLPVFVYARLVFTDQVLKFLSREELVSTLGETVALGASGIVIWGSLSITRSMKSCLLLDTYMETILNPYIINVTLAAKMCSQVLCQEQGVCIRKDWNSSDYLHLNPDNFDIRLEKGGKFTVHGKPTVEDLEEFSEKFYCSCYTNLSCKEKADVKDTDAVDVCIADGVCIDASLKPPVETEGSPPIFYNTSSSTVSTTMFIVNILFLIISSVASL

SEQ ID NO: 255 - protein, 529 aa, Cavia porcellus
  PH20
MGAFTFKHSFFGSFVECSGVLQTVFIFLLIPCCLADKRAPPLIPNVPLLWVWNAPTEFCIGGTNQPLDMSFFSIVGTPRKNITGQSITLYYVDRLGYYPYIDPHTGAIVHGGLPQLMNLQQHLRKSRQDILFYMPTDSVGLAVIDWEEWRPTWTRNWRPKDIYRNKSIELVKSQHPQYNHSYAVAVAKRDFERTGKAFMLETLKLGKSLRPSSLWGYYLFPDCYNTHFTKPNYDGHCPPIELQRNNDLQWLWNDSTALYPSVYLTSRVRSSQNGALYVRNRVHESIRVSKLMDDKNPLPIYVYIRLVFTDQTTTFLELDDLVHSVGEIVPLGVSGIIIWGSLSLTRSLVSCIGLENYMKGTLLPYLINVTLAAKMCGQVLCKNQGICTRKDWNTNTYLHLNATNFDIELQQNGKFVVHGKPSLEDLQEFSKNFHCSCYTNVACKDRLDVHNVRSVNVCTANNICIDAVLNFPSLDDDDEPPITDDTSQNQDSISDITSSAPPSSHILPKDLSWCLFLLSIFSQHWKYLL

SEQ ID NO: 256 - protein, 512 aa, Rattus norvegicus
  PH20
MGELQFKWLFWRSFAESGGTFQTVLIFLFIPYSLTVDYRATPVLSDTTFVWVWNVPTEACVENVTEPIDLSFFSLIGSPRKTAIGQPVTLFYVDRLGNYPHIDAQQTEHHGGIPQKGDLTTHLVKAKEDVERYIPTDKLGLAIIDWEEWRPTWMRNWTPKDIYRNKSIELVQAADPAINITEATVRAKAQFEGAAKEFMEGTLKLGKHIRPKHLWGFYLFPDCYNNKFQVDNYDGQCPDVEKKRNDDLDWLWKESTGLYPSVYLKKDLKSSRKATLYVRYRVLESIRVSKVSDESNPVPIFVYIRLVFTDHVSEYLLEDDLVNTIGEIVAQGTSGIIIWDAMSLAQRSAGCPILRQYMKTTLNPYIVNVTLAAKMCSQTLCKEKGMCSRKTESSDAYLHLDPSSFSINVTEAGKYEVLGKPEVKDLEYFSEHFKCSCFSKMTCEETSDMRSIQDVNVCMGDNVCIKATLGPNSAFHLLPGKGLLLMTTLAHILHHLPHDIFVFPWKMLVSTP

SEQ ID NO: 257 - protein, 512 aa, Mus musculus
  PH20
MGELRFKHLFWGSFVESGGTFQTVLIFLLIPCSLTVDYRAAPILSNTTFLWIWNVPTERCVGNVNDPIDLSFFSLIGSPRKTATGQPVTLFYVDRLGLYPHIDANQAEHYGGIPQRGDYQAHLRKAKTDIEHYIPDDKLGLAIIDWEEWRPTWLRNWKPKDNYRNKSIELVQSTNPGLSITEATQKAIQQFEEAGRKFMEGTLHLGKFLRPNQLWGYYLFPDCYNNKFQDPKYDGQCPAVEKKRNDNLKWLWKASTGLYPSVYLKKDLKSNRQATLYVRYRVVEAIRVSKVGNASDPVPIFVYIRLVFTDRTSEYLLEDDLVNTIGEIVALGTSGIIIWDAMSLAQRAAGCPILHKYMQTTLNPYIVNVTLAAKMCSQTLCNEKGMCSRRKESSDVYLHLNPSHFDIMLTETGKYEVLGNPRVGDLEYFSEHFKCSCFSRMTCKETSDVKNVQDVNVCVGDNVCIKAKVEPNPAFYLLPGKSLLFMTTLGHVLYHLPQDIFVFPRKTLVSTP

SEQ ID NO: 258 - protein, 807 aa, Staphylococcus aureus
  hyaluronidase
MTYRIKKWQKLSTITLLMAGVITLNGGEFRSVDKHQIAVADTNVQTPDYEKLRNTWLDVNYGYDKYDENNPDMKKKFDATEKEATNLLKEMKTESGRKYLWSGAETLETNSSHMTRTYRNIEKIAEAMRNPKTTLNTDENKKKVKDALEWLHKNAYGKEPDKKVKELSENFTKTTGKNTNLNWWDYEIGTPKSLTNTLILLNDQFSNEEKKKFTAPIKTFAPDSDKILSSVGKAELAKGGNLVDISKVKLLECIIEEDKDMMKKSIDSFNKVFTYVQDSATGKERNGFYKDGSYIDHQDVPYTGAYGVVLLEGISQMMPMIKETPFNDKTQNDTTLKSWIDDGFMPLIYKGEMMDLSRGRAISRENETSHSASATVMKSLLRLSDAMDDSTKAKYKKIVKSSVESDSSYKQNDYLNSYSDIDKMKSLMTDNSISKNGLTQQLKIYNDMDRVTYHNKDLDFAFGLSMTSKNVARYESINGENLKGWHTGAGMSYLYNSDVKHYHDNFWVTADMKRLSGTTTLDNEILKDTDDKKSSKTFVGGTKVDDQHASIGMDFENQDKTLTAKKSYFILNDKIVFLGTGIKSTDSSKNPVTTIENRKANGYTLYTDDKQTTNSDNQENNSVFLESTDTKKNIGYHFLNKPKITVKKESHTGKWKEINKSQKDTQKTDEYYEVTQKHSNSDNKYGYVLYPGLSKDVFKTKKDEVTVVKQEDDFHVVKDNESVWAGVNYSNSTQTFDINNTKVEVKAKGMFILKKKDDNTYECSFYNPESTNSASDIESKISMTGYSITNKNTSTSNESGVHFELTK

SEQ ID NO: 259 - protein, 371 aa, Streptococcus pyogenes
  hyaluronidase
  bacteriophage H4489A
MTENIPLRVQFKRMSADEWARSDVILLEGEIGFETDTGFAKFGDGQNTFSKLKYLTGPKGPKGDTGLQGKTGGTGPRGPAGKPGTTDYDQLQNKPDLGAFAQKEETNSKITKLESSKADKSAVYSKAESKIELDKKLSLTGGIVTGQLQFKPNKSGIKPSSSVGGAINIDMSKSEGAAMVMYTNKDTTDGPLMILRSDKDTFDQSAQFVDYSGKTNAVNIVMRQPSAPNFSSALNITSANEGGSAMQIRGVEKALGTLKITHENPNVEAKYDENAAALSIDIVKKQKGGKGTAAQGIYINSTSGTAGKMLRIRNKNEDKFYVGPDGGFHSGANSTVAGNLTVKDPTSGKHAATKDYVDEKIAELKKLILKK

SEQ ID NO: 260 - protein, 1628 aa, Clostridium perfringens
  hyaluronidase
MNKNIRKIITSTVLAAMTISVLPSNLVVFATDGITENFYEIYPKPQEISYSGGEFQISDEINIVYDDGIDTYTKKRVDEVLEASNLEATVSNEIVPGKTNFLVGINESGGVVDNYFNKNIPHDESFFDEKMDANIVSVKDGVIGVIGEDTDSAFYGVTTLKHVFNQLEEGNKIQSFRADDYAEVAHRGFIEGYYGNPWSNEDRAELMKFGGDYKLNQYVFAPKDDPYHNSKWRDLYPEEKLSEIKKLAQVGNETKNRYVYALHPFMNNPVRFDTEENYQNDLGVIKAKFTQLLENDVRQFAILADDASAPAQGASMYVKLLTDLTRWLEEQQSTYPDLKTDLMFCPSDYYGNGSSAQLKELNKAEDNVSIVMTGGRIWGEVDENFANNFMNNISTEGHPGRAPFFWINWPCSDNSKQHLIMGGNDTFLHPGVDPSKIDGIVLNPMQQAEANKSALFAIADYAWNIWDNKEEADENWNDSFKYMDHGTAEETNSSLALREISKHMINQNMDGRVRPLQESVELAPKLEAFKQKYDSGASIKEDALELIAEFTNLQKAADYYKNNPGNERTRDQIIYWLNCWEDTMDAAIGYLKSAIAIEEGDDEAAWANYSEAQGAFEKSKTYGFHYVDHTEYAEVGVQHIVPFIKSMGQNLSVVIGSIVDPNRIIATYISNRQDAPTGNPDNIFDNNASTELVYKNPNRIDVGTYVGVKYSNPITLNNVEFLMGANSNPNDTMQKAKIQYTVDGREWIDLEEGVEYTMPGAIKVENLDLKVRGVRLIATEARENTWLGVRDINVNKKEDSNSGVEFNPSLIRSESWQVYEGNEANLLDGDDNTGVWYKTLNGDTSLAGEFIGLDLGKEIKLDGIRFVIGKNGGGSSDKWNKFKLEYSLDNESWTTIKEYDKTGAPAGKDVIEESFETPISAKYIRLTNMENINKWLTFSEFAIISDELENAGNKENVYTNTELDLLSLAKEDVTKLIPTDDISLNHGEYIGVKLNRIKDLSNINLEISNDTGLKLQSSMNGVEWTEITDKNTLEDGRYVRLINTSNEAVNFNLTKFEVNSNEVYEPSLVDAYVGDDGAKKAVDGDLKTRVKFLGAPSTGDTIVYDLGQEILVDNLKYVVLDTEVDHVRDGKIQLSLDGETWTDAITIGDGVENGVDDMFSTPLKNGYKHGNQSGGIVPIDSAYVEGDNLNQKARYVRILFTAPYRHRWTVINELMINNGEYISTVNDPTYISNPIEERGFAPSNLRDGNLTTSYKPNTNNGEISEGSITYRLSEKTDVRKVTIVQSGSSISNAKVMARVGDGSENVTDQWVQLGTLSNSLNEFINRDYNNIYEIKIEWTDVAPNIYEIITLNQEFEFPVNDSLKAKYDELINLSGDEYTLSSFETLKEALNEAKSILDDSNSSQKKIDKALEKLNKAEERLDLRATDFEDFNKVLTLGNSLVEEEYTAESWALFSEVLEAANEANKNKADYTQDQINQIVIDLDASIKALVKETPEVDKTNLGELINQGKSLLDESVEGFNVGEYHKGAKDGLTVEINKAEEVFNKEDATEEEINLAKESLEGAIARFNSLLIEESTGDFNGNGKIDIGDLAMVSKNIGSTTNTSLDLNKDGSIDEYEISFINHRILN

SEQ ID NO: 261 - protein, 186 aa, Mus musculus
  dihydrofolate reductase
VRPLNCIVAVSQNMGIGKNGDLPWPPLRNEFKYFQRMTTTSSVEGKQNLVIMGRKTWFSIPEKNRPLKDRINIVLSRELKEPPRGAHFLAKSLDDALRLIEQPELASKVDMVWIVGGSSVYQEAMNQPGHLRLFVTRIMQEFESDTFFPEIDLGKYKLLPEYPGVLSEVQEEKGIKYKFEVYEKKD

SEQ ID NO: 262 - protein, 435 aa, Homo sapiens
  Hyaluronidase-1 [Precursor]
MAAHLLPICALFLTLLDMAQGFRGPLLPNRPFTTVWNANTQWCLERHGVDVDVSVFDVVANPGQTFRGPDMTIFYSSQLGTYPYYTPTGEPVFGGLPQNASLIAHLARTFQDILAAIPAPDFSGLAVIDWEAWRPRWAFNWDTKDIYRQRSRALVQAQHPDWPAPQVEAVAQDQFQGAARAWMAGTLQLGRALRPRGLWGFYGFPDCYNYDFLSPNYTGQCPSGIRAQNDQLGWLWGQSRALYPSIYMPAVLEGTGKSQMYVQHRVAEAFRVAVAAGDPNLPVLPYVQIFYDTTNHFLPLDELEHSLGESAAQGAAGVVLWVSWENTRTKESCQAIKEYMDTTLGPFILNVTSGALLCSQALCSGHGRCVRRTSHPKALLLLNPASFSIQLTPGGGPLSLRGALSLEDQAQMAVEFKCRCYPGWQAPWCERKSMW

SEQ ID NO: 263 - protein, 473 aa, Homo sapiens
  Hyaluronidase-2 [Precursor]
MRAGPGPTVTLALVLAVAWAMELKPTAPPIFTGRPFVVAWDVPTQDCGPRLKVPLDLNAFDVQASPNEGFVNQNITIFYRDRLGLYPRFDSAGRSVHGGVPQNVSLWAHRKMLQKRVEHYIRTQESAGLAVIDWEDWRPVWVRNWQDKDVYRRLSRQLVASRHPDWPPDRIVKQAQYEFEFAAQQFMLETLRYVKAVRPRHLWGFYLFPDCYNHDYVQNWESYTGRCPDVEVARNDQLAWLWAESTALFPSVYLDETLASSRHGRNFVSFRVQEALRVARTHHANHALPVYVFTRPTYSRRLTGLSEMDLISTIGESAALGAAGVILWGDAGYTTSTETCQYLKDYLTRLLVPYVVNVSWATQYCSRAQCHGHGRCVRRNPSASTFLHLSTNSFRLVPGHAPGEPQLRPVGELSWADIDHLQTHFRCQCYLGWSGEQCQWDHRQAAGGASEAWAGSHLTSLLALAALAFTWTL

SEQ ID NO: 264 - protein, 417 aa, Homo sapiens
  Hyaluronidase-3 [Precursor]
MTTQLGPALVLGVALCLGCGQPLPQVPERPFSVLWNVPSAHCEARFGVHLPLNALGIIANRGQHFHGQNMTIFYKNQLGLYPYFGPRGTAHNGGIPQALPLDRHLALAAYQIHHSLRPGFAGPAVLDWEEWCPLWAGNWGRRRAYQAASWAWAQQVFPDLDPQEQLYKAYTGFEQAARALMEDTLRVAQALRPHGLWGFYHYPACGNGWHSMASNYTGRCHAATLARNTQLHWLWAASSALFPSIYLPPRLPPAHHQAFVRHRLEEAFRVALVGHRHPLPVLAYVRLTHRRSGRFLSQDDLVQSIGVSAALGAAGVVLWGDLSLSSSEEECWHLHDYLVDTLGPYVINVTRAAMACSHQRCHGHGRCARRDPGQMEAFLHLWPDGSLGDWKSFSCHCYWGWAGPTCQEPRPGPKEAV

SEQ ID NO: 265 - protein, 481 aa, Homo sapiens
  Hyaluronidase-4
MKVLSEGQLKLCVVQPVHLTSWLLIFFILKSISCLKPARLPIYQRKPFIAAWNAPTDQCLIKYNLRLNLKMFPVIGSPLAKARGQNVTIFYVNRLGYYPWYTSQGVPINGGLPQNISLQVHLEKADQDINYYIPAEDFSGLAVIDWEYWRPQWARNWNSKDVYRQKSRKLISDMGKNVSATDIEYLAKVTFEESAKAFMKETIKLGIKSRPKGLWGYYLYPDCHNYNVYAPNYSGSCPEDEVLRNNELSWLWNSSAALYPSIGVWKSLGDSENILRFSKFRVHESMRISTMTSHDYALPVFVYTRLGYRDEPLFFLSKQDLVSTIGESAALGAAGIVIWGDMNLTASKANCTKVKQFVSSDLGSYIANVTRAAEVCSLHLCRNNGRCIRKMWNAPSYLHLNPASYHIEASEDGEFTVKGKASDTDLAVMADTFSCHCYQGYEGADCREIKTADGCSGVSPSPGSLMTLCLLLLASYRSIQL

SEQ ID NO: 266 - protein, 553 aa, Bos taurus
  PH20
MRMLRRHHISFRSFAGSSGTPQAVFTFLLLPCCLALDFRAPPLISNTSFLWAWNAPVERCVNRRFQLPPDLRLFSVKGSPQKSATGQFITLFYADRLGYYPHIDEKTGKTVFGGIPQLGNLKSHMEKAKNDIAYYIPNDSVGLAVIDWENWRPTWARNWKPKDVYRDESVELVLQKNPQLSFPEASKIAKVDFETAGKSFMQETLKLGKLLRPNHLWGYYLFPDCYNHNHNQPTYNGNCPDVEKRRNDDLEWLWKESTALFPSVYLNIRLKSTQNAALYVRNRVQEAIRLSKIASVESPLPVFVYARPVFTDGSSTYLSQGDLVNSVGEIVSLGASGIIMWGSLNLSLSMQSCMNLGTYLNTTLNPYIINVTLAAKMCSQVLCHNEGVCTRKHWNSSDYLHLNPMNFAIQTGEGGKYTVPGTVTLEDLQKFSDTFYCSCYANIHCKKRVDIKNVHSVNVCMAEDICIDSPVKLQPSDHSSSQEASTTTFSSISPSTTTATVSPCTPEKHSPECLKVRCSEVIPNVTQKACQSVKLKNISYQSPIQNIKNQTTY

SEQ ID NO: 267 - protein, 114 aa, Ovis aries
  PH20 partial sequence
LYVRNRVREAIRLSKIASVESPLPVFVYHRPVFTDGSSTYLSQGDLVNSVGEIVALGASGIIMWGSLNLSLTMQSCMNLGNYLNTTLNPYIINVTLAAKMCSQVLCQEQGVCIR

SEQ ID NO: 268 - DNA, 1446 bp, Homo sapiens
  DNA encoding soluble rHuPH20 "precursor"
atgggagtgctaaaattcaagcacatctttttcagaagctttgttaaatcaagtggagtatcccagatagttttcaccttccttctgattccatgttgcttgactctgaatttcagagcacctcctgttattccaaatgtgcctttcctctgggcctggaatgccccaagtgaattttgtcttggaaaatttgatgagccactagatatgagcctcttctctttcataggaagcccccgaataaacgccaccgggcaaggtgttacaatattttatgttgatagacttggctactatccttacatagattcaatcacaggagtaactgtgaatggaggaatcccccagaagatttccttacaagaccatctggacaaagctaagaaagacattacattttatatgccagtagacaatttgggaatggctgttattgactgggaagaatggagacccacttgggcaagaaactggaaacctaaagatgtttacaagaataggtctattgaattggttcagcaacaaaatgtacaacttagtctcacagaggccactgagaaagcaaaacaagaatttgaaaaggcagggaaggatttcctggtagagactataaaattgggaaaattacttcggccaaatcacttgtggggttattatctttttccggattgttacaaccatcactataagaaacccggttacaatggaagttgcttcaatgtagaaataaaaagaaatgatgatctcagctggttgtggaatgaaagcactgctctttacccatccatttatttgaacactcagcagtctcctgtagctgctacactctatgtgcgcaatcgagttcgggaagccatcagagtttccaaaatacctgatgcaaaaagtccacttccggtttttgcatatacccgcatagtttttactgatcaagttttgaaattcctttctcaagatgaacttgtgtatacatttggcgaaactgttgctctgggtgcttctggaattgtaatatggggaaccctcagtataatgcgaagtatgaaatcttgcttgctcctagacaattacatggagactatactgaatccttacataatcaacgtcacactagcagccaaaatgtgtagccaagtgctttgccaggagcaaggagtgtgtataaggaaaaactggaattcaagtgactatcttcacctcaacccagataattttgctattcaacttgagaaaggtggaaagttcacagtacgtggaaaaccgacacttgaagacctggagcaattttctgaaaaattttattgcagctgttatagcaccttgagttgtaaggagaaagctgatgtaaaagacactgatgctgttgatgtgtgtattgctgatggtgtctgtatagatgcttttctaaaacctcccatggagacagaagaacctcaaattttctac

SEQ ID NO: 269 - protein, 509 aa, Homo sapiens
  PH20 variant P48A
MGVLKFKHIFFRSFVKSSGVSQIVFTFLLIPCCLTLNFRAPPVIPNVAFLWAWNAPSEFCLGKFDEPLDMSLFSFIGSPRINATGQGVTIFYVDRLGYYPYIDSITGVTVNGGIPQKISLQDHLDKAKKDITFYMPVDNLGMAVIDWEEWRPTWARNWKPKDVYKNRSIELVQQQNVQLSLTEATEKAKQEFEKAGKDFLVETIKLGKLLRPNHLWGYYLFPDCYNHHYKKPGYNGSCFNVEIKRNDDLSWLWNESTALYPSIYLNTQQSPVAATLYVRNRVREAIRVSKIPDAKSPLPVFAYTRIVFTDQVLKFLSQDELVYTFGETVALGASGIVIWGTLSIMRSMKSCLLLDNYMETILNPYIINVTLAAKMCSQVLCQEQGVCIRKNWNSSDYLHLNPDNFAIQLEKGGKFTVRGKPTLEDLEQFSEKFYCSCYSTLSCKEKADVKDTDAVDVCIADGVCIDAFLKPPMETEEPQIFYNASPSTLSATMFIVSILFLIISSVASL

SEQ ID NO: 270 - protein, 509 aa, Homo sapiens
  precursor PH20 variant L499W
MGVLKFKHIFFRSFVKSSGVSQIVFTFLLIPCCLTLNFRAPPVIPNVPFLWAWNAPSEFCLGKFDEPLDMSLFSFIGSPRINATGQGVTIFYVDRLGYYPYIDSITGVTVNGGIPQKISLQDHLDKAKKDITFYMPVDNLGMAVIDWEEWRPTWARNWKPKDVYKNRSIELVQQQNVQLSLTEATEKAKQEFEKAGKDFLVETIKLGKLLRPNHLWGYYLFPDCYNHHYKKPGYNGSCFNVEIKRNDDLSWLWNESTALYPSIYLNTQQSPVAATLYVRNRVREAIRVSKIPDAKSPLPVFAYTRIVFTDQVLKFLSQDELVYTFGETVALGASGIVIWGTLSIMRSMKSCLLLDNYMETILNPYIINVTLAAKMCSQVLCQEQGVCIRKNWNSSDYLHLNPDNFAIQLEKGGKFTVRGKPTLEDLEQFSEKFYCSCYSTLSCKEKADVKDTDAVDVCIADGVCIDAFLKPPMETEEPQIFYNASPSTLSATMFIVSIWFLIISSVASL

SEQ ID NO: 271 - protein, 520 aa, Ovis aries
LDFPAPPLISNTSFLWAWNAPAERCVKIFKLPPDLRLFSVKGSPQKSATGQFITLFYADRLGYYPHIDEKTGNTVYGGIPQLGNLKNHLEKAKKDIAYYIPNDSVGLAVIDWENWRPTWARNWKPKDVYRDESVELVLQKNPQLSFPEASKIAKVDFETAGKSFMQETLKLGKLLRPNHLWGYYLFPDCYNHNYNQPTYNGNCSDLEKRRNDDLDWLWKESTALFPSVYLNIKLKSTPKAAFYVRNRVQEAIRLSKIASVESPLPVFVYHRPVFTDGSSTYLSQGDLVNSVGEIVALGASGIIMWGSLNLSLTMQSCMNLGNYNTTLNPYIINVTLAAKMCSQVLCHDEGVCTRKQWNSSDYLHLNPIMNFAIQTGKGGKYTVPGKVTLEDLQTFSDKFYCSCYANINCKKRVDIKNVHSVNVCMAEDICIEGPVKLQPSDHSSSQNEASTTTVSSISPSTTATTVVSPCTPEKQSPECLKVRCLEAIANVTQTGCQGVKWKNTSSQSQSSIQNIKNQTT

SEQ ID NO: 272 - protein, 474 aa, Bos taurus
  PH20
MGMFRRHHISFRSFAGSSGTPQAVFTFLLLPCCLALDFRAPPLISNTSFLWAWNAPVERCVNRRFQLPPDLRLFSVKGSPQKSATGQFITLFYADRLGYYPHIDEKTGKTVFGGIPQLGNLKSHLEKAKNDIAYYIPNDSVGLAVIDWENWRPTWARNWKPKDVYRDESVELVLQKNPQLSFPEASKIAKVDFETAGKSFMQETLKLGKLLRPNHLWGYYLFPDCYNHNHNQPTYNGNCPDVEKRRNDDLEWLWKESTALFPSVYLNIRLKSTQNAALYVRNRVQEAIRLSKIASVESPLPVFVYARPVFTDGSSTYLSQGDLVNSVGEIVSLGASGIIMWGSLNLSLSVQSCMNLGTYLNTTLNPYIINVTLAAKMCSQVLCHDGGVCTRKHWNSSDYLHLNPMNFAIQTGEGGKYTVPGTLTLEDLQKFSDTFYCSCYSNLSCKKRVDIKNVHSVDVCMAEDVCIDAFLKPP

SEQ ID NO: 273 - protein, 517 aa, Ovis aries
DFRAPPLISNTSFLWAWNAPAERCIKIFKLPPDLRLFSVKGSPQKSATGQFITLFYADRLGYYPHIDEKTGNTVYGGIPQLGNLKNHLEKAKKDIAYYIPNDSVGLAVIDWENWRPTWARNWKPKDVYRDESVELVLQKNPQLSFPEASKIAKVDFETAGKSFMQETLKLGKLLRPNHLWGYYLFPDCYNHNYNQPTYNGNCSDLEKRRNDDLDWLWKESTALFPSVYLNIKLKSTPKAAFYVRNRVQEAIRLSKIASVESPLPVFVYHRPVFTDGSSTYLSQGDLVNSVGEIVALGASGIIMWGSLNLSLTMQSCMNLGNYLNTTLNPYIINVTLAAKMCSQVLCHDEGVCTRKQWNSSDYLHLNPMNFAIQTGKGGKYTVPGKVTLEDLQTFSDKFYCSCYANINCKKRVDIKNVHSVNVCMAEDICIEGPVKLQPSDHSSSQNEASTTTVSSISPSTTATTVSPCTPEKQSPECLKVRCLEAIANVTQTGCQGVKWKNTSSQSSIQNIKNQTTY

SEQ ID NO: 274 - DNA, 1620 bp, Ovis aries
ttttccgtgttggttggctctggacttcagagcaccccctctcatttcaaacacttctttcctctgggcctggaatgccccagctgaacgttgtattaaaatctttaaactacctccagatctgagactcttctctgtaaaaggaagcccccaaaaaagtgctacgggacaatttattacattattttatgctgatagacttggctactatcctcatatagatgaaaaaacaggcaacactgtatatggaggaattccccagttgggaaacttaaaaaatcatttggaaaaagccaaaaaagacattgcctattacataccaaatgacagcgtgggcttggcggtcattgactgggaaaactggaggcctacctgggcaagaaactggaaacctaaagatgtttacagggatgagtctgttgagttggttctgcaaaaaaatccacaactcagtttcccagaggcttccaagattgcaaaagtggattttgagacagcaggaaagagtttcatgcaagagactttaaaactgggaaaattacttcggccaaatcacttatggggttattatctttttcctgattgttacaatcataattataaccagcctacttacaatggaaattgctctgatttagaaaaaaggagaaatgatgatctcgactggttgtggaaggaaagcactgcccttttcccttctgtttatttgaatatcaagttaaaatctactccaaaagctgccttctatgttcgtaatcgtgtccaggaagccattcggttgtctaaaatagcgagtgttgaaagtccacttcccgtttttgtatatcaccgtccagtttttactgatgggtcttcaacatacctttctcagggtgaccttgtgaattcggttggtgagatcgttgctctaggtgcctctgggattataatgtggggcagtctcaatctaagcctaactatgcaatcttgcatgaacctaggcaattacttgaacactacactgaatccttacataatcaacgtcaccctagcagccaaaatgtgcagccaagtgctttgccacgatgaaggagtgtgtacaaggaaacaatggaattcaagcgactatcttcacctgaacccaatgaattttgctattcaaactgggaaaggtggaaaatacacagtacctgggaaagtcacacttgaagacctgcaaacgttttctgataaattttattgcagttgttatgccaacatcaactgtaagaagagagttgatataaaaaatgttcatagtgttaatgtatgtatggcagaagacatttgtatagagggccctgtgaagttacaacccagtgatcattcctctagccagaatgaggcatctactaccaccgtcagcagtatctcaccctctactacagccaccacagtatctccatgtactcctgagaaacagtcccctgagtgcctcaaagtcaggtgtttggaagccatcgccaacgtcacccaaacggggtgtcaaggtgttaaatggaagaacacttccagtcagtcaagtattcaaaatattaaaaatcaaacaacctattaaaatataaattcagtgcttataaaaaaaaaaaaaaaaaaaaaaaa

SEQ ID NO: 275 - protein, 793 aa, Arthrobacter species
  hyaluronan lyase
  strain FB24
MTREFSRRTALKGAALSGLLLAMVHGPAHAAATANATLTPADFAGLRQRWVDQITGRKVLVAGDNDFVTALAALDKKARTAIDLLERSAGRLTVFSDLSLAKDTDLVTTHTRLATMATAWATPGSEHFADAGLLAAIRAGLADANSLCYNASKEEQGNWWSWEIGTPKALADTMVLLHAELTAAERAAYCAAIDHFVPDPWQQFPPKRGKITSVGANRVDLCQAVTIRSLVDEDAEKLTHAVAGLSEVWQYVSAGNGFFTDGSFIQHSTTPYTGSYGVVLLTGLSKLFALLGGTGAEVSDPSRDILFKTVEGSFAPFMVAGAMADSVRGRSISRESNTGFDLGASTIESILLLARAVDPVTARRWRSLCLAWINQNRKAPILADAGVGRTALVKELLAMGLTETDLPGGHYLFPAMDRTMHHSQGWTLSTAMASSRIAWYECGNGENNRGYHTGSGMTYVYDGDLGQYDDAFWATANHCRLPGITVDTSSLPDKVEGEWGAATPANEWTGSTAYGDVAAVGQHLIGPGGTGLTARKSWFVSKDVIVCLGADIRTGSGSRIETVVDHRNLHAGFNAMGTAAGTVAATPGHPEVLTVDRWVHLEGFGGYVVLDAAPLQVLREQREGSWSEVNVKGSAARQTRNYATLYFDHGHEPEAASYAYLVAPGASASMTSSLSGQSFHTVLRNDEVAQAVKFKKEKTTAATFWRPGTVGDLALSGPACVVVKEVGDRLSIAVSDPTQNASTLTLRLKTKRFFRIIEGQGASLSHGADGFTVLEVDIANHAGRTKQIELSAE

SEQ ID NO: 276 - protein, 557 aa, Bdellovibrio bacteriovorus
  hyaluronan lyase
MTKFFFLLTLISATAFAQSEPDWTAGVPVPPGGRSNIYSWNDFDFQATLNKGKIHAQVYPVTVTGMLPPYEPVRRLIEEKNSNPLRKWIQSLMKGLSGFRSFEDVLKNLGLHKYPLENERGVYAVPYPNEIRPDTLMGFGLIERNGAEGFTFSCAACHSSNLFGKTVLGMTNRFPRANEFFIKAKKVMPLMDPHIFQAYTRATDAETALLVESKERLKSVALKQPIALGLDTSLAQVSLSLNRRAKDGYANYSDKAARSPRADAYLDNKPADSKPAVWWNVKYKNRWLSDGSVLSGNPIFTNLIWNEIGRGADLHELEQWLADNDHIIKELTTAVFASEAPHITDFYPAEKIDLGRAKAGEQIFKNTCAKCHGHYEKAWNLPQALVLSAAERLKTVEVRYKEKTPVVNVGTDPFRRQGMKSLEQLNDLEISKKNGIVIKAQEGYVPPPLVGIWARWPYMHNNSIPNLCVLLTPAKKRPSIYYSGEALNKDTDYDFSCGGYPIGDKTPKAWKTREHLYDTRNPGMGNMGHDEGIFIKDGKEILSAEDKYNLIQFLQTL

SEQ ID NO: 277 - protein, 813 aa, Propionibacterium acnes
  hyaluronan lyase
MFGTPSRRTFLTASALSAMALAASPTVTDAIAAPGPDSWSALCERWIDIITGRRAARTSDPRARAIIAKTDRKVAEILTDLVSGSSRQTVLISADLRKEQSPFITKTARAIESMACAWATPGSSYHKDPEILSACIEGLRDFCRLRYNPSQDEYGNWWDWEDGASRAVADVMCILHDVLPPEVMSAAAAGIDHFIPDPWFQQPASVKPTANPVQPVVSTGANRMDLTRAVMCRSIATGDEKRLRHAVDGLPDAWRVTTEGDGFRADGGFIQHSHIPYTGGYGDVLFSGLAMLFPLVSGMRFDIVESARKAFHDQVERGFIPVMYNGQILDDVRGRSISRINESAAMHGISIARAMLMMADALPTHRAEQWRGIVHGWMARNTFDHLSEPSTLVDISLFDAAAKARPVPESSTPSYFASMDRLVHRTADWLITVSNCSDRIAWYEYGNGENEWASRTSQGMRYLLLPGDMGQYEDGYWATVDYSAPTGTTVDSTPLKRAVGASWAAKTPTNEWSGGLASGSWSAAASHITSQDSALKARRLWVGLKDAMVELTTDVTTDASRAITVVEHRKVASSSTKLLVDGNRVSSATSFQNPRWAHLDGVGGYVFATDTDLSADVATRKGTWIDVNPSRKVKGADEVIERAYASLHVTHHDRPVAWALLPTASRSHTMALATRPGVEPFTVLRNDATVQAVRSAGALLTKDPTVVTTLAFWKPATCGGVAVNRPALVQTRESANQMEVVIVEPTQKRGSLTVTIEGSWKVKTADSHVDVSCENAAGTLHVDTAGLGGQSVRVTLARQVTQTPSGGGRHDRA

SEQ ID NO: 278 - protein, 1072 aa, Streptococcus agalactiae
  hyaluronan lyase
MEIKKKYRIMLYSALILGTILVNNSYQAKAEELTKTTSTSQIRDTQTNNIEVLQTESTTVKETSTTTTQQDLSNPTASTATATATHSTMKQVVDNQTQNKELVKNGDFNQTNPVSGSWSHTSAREWSAWIDKENTADKSPIIQRTEQGQVSLSSDKGFRGAVTQKVNIDPTKKYEVKFDIETSNKAGQAFLRIMEKKDNNTRLWLSEMTSGTTNKHTLTKIYNPKLNVSEVTLELYYEKGTGSATFDNISMKAKGPKDSEHPQPVTTQIEESVNTALNKNYVFNKADYQYTLTNPSLGKIVGGILYPNATGSTTVKISDKSGKIIKEVPLSVTASTEDKFTKLLDKWNDVTIGNHVYDTNDSNMQKINQKLDETNAKNIKTIKLDSNHTFLWKDLDNLNNSAQLTATYRRLEDLAKQITNPHSTIYKNEKAIRTVKESLAWLHQNFYNVNKDIEGSANWWDFEIGVPRSITATLALMNNYFTDAEIKTYTDPIEHFVPDAGYFRKTLDNPFKALGGNLVDMGRVKIIEGLLRKDNTIIEKTSHSLKNLFTTATKAEGFYADGSYIDHTNVAYTGAYGNVLIDGLTQLLPIIQETDYKISNQELDMVYKWINQSFLPLIVKGELMDMSRGRSISREAASSHAAAVEVLRGFLRLANMSNEERNLDLKSTIKTIITSNKFYNVFNNLKSYSDIANMNKMLNDSTVATKPLKSNLSTFNSMDRLAYYNAEKDFGFALSLHSKRTLNYEGMNDENTRGWYTGDGMFYLYNSDQSHYSNHFWPTVNPYKMAGTTEKDAKREDTTKEFMSKHSKDAKEKTGQVTGTSDFVGSVKLNDHFALAAMDFTNWDRTLTAQKGWVILNDKIVFLGSNIKNTNGIGNVSTTIDQRKDDSKTPYTTYVNGKTIDLKQASSQQFTDTKSVFLESKEPGRNIGYIFFKNSTIDIERKEQTGTWNSINRTSKNTSIVSNPFITISQKHDNKGDSYGYMMVPNIDRTSFDKLANSKEVELLENSSKQQVIYDKNSQTWAVIKHDNQESLINNQFKMNKAGLYLVQKVGNDYQNVYYQPQTMTKTDQLAI

SEQ ID NO: 279 - protein, 1072 aa, Streptococcus agalactiae
  hyaluronan lyase
  18RS21
MEIKKKHRIMLYSALILGTILVNNSYQAKAEELTKTTSTSQIRDTQTNNIEVLQTESTTVKETSTTTTQQDLSNPTASTATATATHSTMKQVVDNQTQNKELVKNGDFNQTNPVSGSWSHTSAREWSAWIDKENTADKSPIIQRTEQGQVSLSSDKGFRGAVTQKVNIDPTKKYEVKFDIETSNKAGQAFLRIMEKKDNNTRLWLSEMTSGTTNKHTLTKIYNPKLNVSEVTLELYYEKGTGSATFDNISMKAKGPKDSEHPQPVTTQIEESVNTALNKNYVFNKADYQYTLTNPSLGKIVGGILYPNATGSTTVKISDKSGKIIKEVPLSVTASTEDKFTKLLDKWNDVTIGNHVYDTNDSNMQKINQKLDETNAKNIKTIKLDSNHTFLWKDLDNLNNSAQLTATYRRLEDLAKQITNPHSTIYKNEKAIRTVKESLAWLHQNFYNVNKDIEGSANWWDFEIGVPRSITATLALMNNYFTDAEIKTYTDPIEHFVPDAGYFRKTLDNPFKALGGNLVDMGRVKIIEGLLRKDNTIIEKTSHSLKNLFTTATKAEGFYADGSYIDHTNVAYTGAYGNVLIDGLTQLLPIIQETDYKISNQELDMVYKWINQSFLPLIVKGELMDMSRGRSISREAASSHAAAVEVLRGFLRLANMSNEERNLDLISTIKTIITSNKFYNVFNNLKSYSDIANMNKMLNDSTVATKPLKSNLSTFNSMDRLAYYNAEKDFGFALSLHSKRTLNYEGMNDENTRGWYTGDGMFYLYNSDQSHYSNHFWPTVNPYKMAGTTEKDAKREDTTKEFMSKHSKDAKEKTGQVTGTSDFVGSVKLNDHFALAAMDFTNWDRTLTAQKGWVILNDKIVFLGSNIKNTNGIGNVSTTIDQRKDDSKTPYTTYVNGKTIDLKQASSQQFTDTKSVFLESKEPGRNIGYIFFKNSTIDIERKEQTGTWNSINRTSKNTSIVSNPFITISQKHDNKGDSYGYMMVPNIDRTSFDKLANSKEVELLENSSKQQVIYDKNSQTWAVIKHDNQESLINNQFKMNKAGLYLVQKVGNDYQNVYYQPQTMTKTDQLAI

SEQ ID NO: 280 - protein, 1081 aa, Streptococcus agalactiae
  hyaluronan lyase
  serotype Ia
MEIKKKHRIMLYSALILGTILVNNSYQAKAEEFTKTTSTSQIRDTQTNNVEVPQTESTTVKGTSTTTTQQDLSNSTASTATATATHSTMKQVVDNQTQNKELVKNGDFKEKIIDKKIDKKSQWTNLYGAKDWNTYIDQTKSVNKSPIIQRTEQGQVSLSSDKGFRGAVTQKVNIDPTKKYEVKFDIETSNKVGQAFLRIMKKKDKNTRLWLSEMTSGTTNKHTLTKIYNPKLNVSEVTLELYYEKGTGSVTFDNISMKAKGPKDSEHPQPVTTQIEESVNTALNKNYVFNKADYQYTLTNPSLGKIVGGILYPSATGSTTVKISDKSGKIIKEVPLSVTASTEDNFTKLLDKWNDVTIGNHVYDTNDSNMQKLNQKLDETNAKNIKDIKLDSNRTFLWEDLKGLNNSAQLTATYRRLEDLAKQITNPHSTIYKNEKAIRTVKESLAWLHQNFYNVNKDIEGSANWWDFEIGVPRSITATLALMNNYFTDAEIKTYTDPIEHFVPDAGYFRKTLVNPFKALGGNLVDMGRVKIIEGLLRKDNTIIKKTSHSLKNLFTTATKAEGFYADGSYIDHTNVAYTGAYGNVLIDGLTQLLPIIQETDYKISNQELDMVYKWINQSFLPLIVKGELMDMSRGRSISREAASSHAAAVEVLRGFLRLANMSNEERNLDLKSTIKTIITSNKFYNVFNNLKSYSDIANMNKLLNDSTVATKPLKSNLSTFNSMDRLAYYNAEKDFGFALSLHSKRTLNYEGMNDENTRGWYTGDGMFYLYNSDQSHYSNHFWPTVNPYKMAGTTEKDTGREDTIKKLMNRYDKTNKNSKVMTGQVTGTSDFVGSVKLNDHFALAAMDFTNWDRTLTAQKGWVILNDKIVFLGSNIKNTNGVGNVSTTIDQRKDDSKTPYTTYVNGKTVDLKQASSQQFTDTKSVFLESKEPGRNIGYIFFKNSTIDIERKEQTGTWNSINRTSKNTSIVSNPFITISQKHDNKGDSYGYMMVPNIDRTSFDKLANSKEVELLENSSKQQVIYDKNSQTWAVIKHDNQESLINNQFKMNKAGLYLVQKVGNDYQNVYYQPQTMTKTDQLAI

SEQ ID NO: 281 - protein, 984 aa, Streptococcus agalactiae
  hyaluronan lyase
  serotype III
MKQVVDNQTQNKELVKNGDFNQTNPVSGSWSHTSAREWSAWIDKENTADKSPIIQRTEQGQVSLSSDKGFRGAVTQKVNIDPTKKYEVKFDIETSNKAGQAFLRIMEKKDNNTRLWLSEMTSGTTNKHTLTKIYNPKLNVSEVTLELYYEKGTGSATFDNISMKAKGPKDSEHPQPVTTQIEESVNTALNKNYVFNKADYQYTLTNPSLGKIVGGILYPNATGSTTVKISDKSGKIIKEVPLSVTASTEDKFTKLLDKWNDVTIGNHVYDTNDSNMQKINQKLDETNAKNIKTIKLDSNHTFLWKDLDNLNNSAQLTATYRRLEDLAKQITNPHSTIYKNEKAIRTVKESLAWLHQNFYNVNKDIEGSANWWDFEIGVPRSITATLALMNNYFTDAEIKTYTDPIEHFVPDAGYFRKTLDNPFKALGGNLVDMGRVKIIEGLLRKDNTIIEKTSHSLKNLFTTATKAEGFYADGSYIDHTNVAYTGAYGNVLIDGLTQLLPIIQETDYKISNQELDMVYKWINQSFLPLIVKGELMDMSRGRSISREAASSHAAAVEVLRGFLRLANMSNEERNLDLKSTIKTIITSNKFYNVFNNLKSYSDIANMNKMLNDSTVATKPLKSNLSTFNSMDRLAYYNAEKDFGFALSLHSKRTLNYEGMNDENTRDWYTGDGMFYLYNSDQSHYSNHFWPTVNPYKMAGTTEKDAKREDTTKEFMSKHSKDAKEKTGQVTGTSDFVGSVKLNDHFALAAMDFTNWDRTLTAQKGWVILNDKIVFLGSNIKNTNGIGNVSTTIDQRKDDSKTPYTTYVNGKTIDLKQASSQQFTDTKSVFLESKEPGRNIGYIFFKNSTIDIERKEQTGTWNSINRTSKNTSIVSNPFITISQKHDNKGDSYGYMMVPNIDRTSFDKLANSKEVELLENSSKQQVIYDKNSQTWAVIKHDNQESLINNQFKMNKAGLYLVQKVGNDYQNVYYQPQTMTKTDQLAI

SEQ ID NO: 282 - protein, 807 aa, Staphylococcus aureus; identical to SEQ ID NO: 258
  hyaluronan lyase
  strain COL

SEQ ID NO: 283 - protein, 420 aa, Staphylococcus aureus
  hyaluronan lyase
  strain MRSA252
MTYRMKKWQKLSTITLLMAGVITLNGGEFRSIDKHQIAVADTNVQTTDYEKLRNIWLDVNYGYDKYDENNPDMKKKFEATENEAEKLLKEMKTESDRKYLWESSKDLDTKSADMTRTYRNIEKISEAMKHKNTKLKTDENKTKVKDALEWLHKNAYGKEPDKKVADLTSNFKNKTSRNTNLNWWDYEIGTPRALTNTLILLQEDFTDEEKKKYTAPIKTFAPDSDKILSSVGKSEPAKGGNLVDISKVKLLESIIEEDKDMMKKSIDSFNTVFTYAQNSATGKERNGFYKDGSYIDHQDVPYTGAYGVVLLEGISQMMPMIKETPFNDSNQNDTTLKSWIDDGFMPLIYKGEMMDLSRGRAISRENETSHSASATVMKSLLRLSDTMDKSTKAKYKKIVKTSVESDSSYKQTDYLSSYSD

SEQ ID NO: 284 - protein, 806 aa, Staphylococcus aureus
  hyaluronan lyase
  strain MRSA252
MTNKMKKWQKLSTITLLMTGVIALNNGEFRNVDKHQIAVADTNVQTPDYEKLKKTWLDVNYGYDQYDENNQDMKKKFDAKEKEAKKLLDDMKTDTNRTYLWSGAENLETNSSHMTKTYRNIEKIAESMQHKNTVLKTVENKLKIKEALDWMHKNVYGKNPSQKVEDLTKNRKGQTTPKNNSLNWWDYEIGTPRALTNTLLLMDDMLTKDEMKNYSKPISTYAPSSDKILSSVGESEDAKGGNLVDISKVKLLESVIEEDVDMLKKSIDSFNKVFTYVQDSATGKGRNGFYKDGSYIDHQDVPYTGAYGVVLLEGISQMMPMIKESPFKTTQDNATLSNWIDEGFMPLIYKGEMMDLSRGRAISRENETSHTASATVMKSLLRLNDTMDDSTKTRYKQIVKTSVNSDSSYNQNNYLNSYSDIAKMKKLMNDSTISKNDLTQQLKIYNDMDRVTYHNKDLDFAFGLSMTSKNIARYENINGENLKGWHTGAGMSYLYNSDVKHYRDNFWATADMTCLPGTTTLNDMPSTNTKNDKSFVGGTKLNNKYASIGMDFENQDKTLTAKKSYFILNDKIVFLGTGIKSTDSSKNPVTSVENRKANGYKLFKDDIEITTSDVNAQETHSVFLESNDTKKNIGYHFLDKPKITVKKESHTGKWSEINKSQKKDDKKDEYYEVTQTHNTSDSKYAYVLYPGLSKSDFKSKNNNVSIVKQDEDFHVIKDNDGVFAGVNYSDNTKSFDINGITVELKEKGMFVIKKKDDKAYKCSFYNPETTNTASNIESKIFIKGYTITNKSVINSNDAGVNFELTK

SEQ ID NO: 285 - protein, 815 aa, Staphylococcus aureus
  hyaluronan lyase
  strain MSSA476
MTYRIKKWQKLSTITLLMAGVITLNGGEFRSIDKYQIAVADTNVQTPDYEKLRNTWLDVNYGYDKYDEKNDAMKKKFEATENEAKKLLSEMKTESDRKYLWENSKDLDTKSADMTRTYRNIEKIAEAMKHKDTKLKIDENKKKVKDALEWLHKNAYGKEPDKKVADLTSNFKNKTSRNTNLNWWDYEIGTPRALTNTLILLNDQFSNDEKKKYTAPIKTFAPESDKILSSVGQPEQAKGGNLVDIAKVKLLESIIEEDKDITKNSIDAFNKVFTYVQSNATGKERNGFYKDGSYIDHQDVPYTGAYGVVLLEGISQMMPMIKETPFNDKTQNDTTLKSWIDDGFMPLIYKGEMMDLSRGRAISRENETSHTASATVMKSLLRLSDAMDDSTKAKYKQIVKTSVKSDSSYGQNDTLSSYSDISKMKSLMEDSTISTNGLTQQLKIYNDMDRVTYHNKDLDFAFGLSMTSKNVARYESINGENLKGWHTGAGMSYLYNSDVKHYRDNFWATADMKRLAGTTTLENEEPKGTDVKKSSKTFVGGTKFDDQHASIGMDFENQDKTLTAKKSYFILNDKIVFLGTGIKSTDSSKNPVTTIENRKANGYTLYTDDKQTTASDNQGTNSVFLESTNKPKNNIGYHFLNESKITVKKESHTGKWSDINKSQKQDSKTNQYYEVTQKHSNTDSKYAYVLYPGLSKDDFNTKKDKVTVVKQDDDFHVVKDNESVWAGVNYSDSTQTFIINNTKVEVKAKGMFILKKKDDKTYECSFYNPESTNTASDIESKISMTGYSITNKNTSTSNESGVRFELQQTLNKDDN

SEQ ID NO: 286 - protein, 807 aa, Staphylococcus aureus; identical to SEQ ID NO: 258
  hyaluronan lyase
  strain NCTC 8325

SEQ ID NO: 287 - protein, 809 aa, Staphylococcus aureus
  hyaluronan lyase
  strain bovine RF122
MTYRMKKWQKLSTITLLMAGGITFNDSEFRSVDKHQIAVADTNVQTPNYEKLKNTWLDVNYGYDKYDESNPDMKKKFEATEKEARKLLSEMKTESDRKYLWENSKDLDTKSADMTRTYRNIEKIAEAMKHPKTTLKNDENKKKVKDALEWLHKNAYGKEPGKKVADLKTNFSKSAPQKNTNLNWWDYEIGTPRALTNTLILLKEDFTDEEKKKYTAPIKTFAPKSDEILSSVGKAEPAKGGNLVDISKVKLLESIIEEDKDMMKNSIDSFNKVFTYVQDSATDKERNGFYKDGSYIDHKDVPYTGAYGVVLLEGISQMMPMIKETPFNDKTQNNTTLTSWIDDGFMPLIYKGEMMDLSRGRAISRENETSHSASATVMKSLLRLSDAMDESTKAKYKQIVKNSVKSDSSYGQNDTLSSYSDIDKMKSLMTDSTISTNGLTQQLKIYNAMDRVTYHNKDLDFAFGLSMTSKNVARYENINGENLKGWHTGAGMSYLYNSDVRHYRDNFWATADMKRLADTTTLENEEPKGTDVKKSSKTFVGGTKFDDQHASIGMDFENQDKTLTAKKSYFILNDKIVFLGTGIKTTDSSKNPVTTIENRKAHGYTLYTDDKQTTNSNNQETNSVFLESTNSTQNNIGYHFLNKSKITVKKESHTGKWSDINKSQKDTQKTDEYYEVTQKHSNTDDKYAYVLYPGITKDNFKSKASQVTVVKQDDDFHVVKDNESVWAGVNYSDSTQTFDINGTKVEVKAKGMFILKKKDDNTYECSFYNPESTNSASDIESKISMTGYSITNKNTSNTNESGVRFELTK

SEQ ID NO: 288 - protein, 807 aa, Staphylococcus aureus
  hyaluronan lyase
  strain bovine RF122
MTYKMKKWQKLSTITLLMAGVITLNNGEFRNVDKHQIAVADTNVQTPDYEKLKKTWLDVNYGNDQYDENNQDMKKKFDAKENEAKKLLEDMKTDTNRTYLWSGAENLETNSSHMTKTYRNIEKIAEAMRHKNTSLKTDENKLKIKDAIKWLHHNVYGKDPDKKVADLTTNRKEKDSSKKNNSLNWWDYEIGTPRALTNTLLLMDNMLTKDEMKNYSKPISIYSPSSYKILSSVGESEDAKGGNLVDIAKVKFLESVIEEDVDMMKKSIDSFNKVFTYVQDSATGKARNGFYKDGSYIDHQDVPYTGAYGVVLLEGISQMMPMIKESPFKHTQDKATLSNWIDEGFMPLIYKGEMMDLSRGRAISRENETSHTASATVMKSLLRLSDTMDESTKTKYKQIVKTSVKSDSSYDSNDTLNSYSDIDKMKKLMNDSTISKNDLTQQLKIYNDMDRVTYHNKELDFAFGLSMTSKNIARYENINGENLKGWHTGAGMSYLYNSDVKHYRDNFWATADMTRLPGTTTLNDMPSTNTKNDKSFVGGTKLNNKYASIGMDFENQDKTLTAKKSYFILNDKIVFIGTGIKSTDSSKNPVTSVENRKANGYKLFKGDIEITTSDVNAQETHSVFLESNDTKKNIGYHFLDKPKITVKKESHTGKWSEINKSQKTDDKKDEYYEVTQTHNTSDSKYAYVLYPGLSKSDFKSKNNNVSIVKQDEDFHVIKDNDGVFAGVNYSDSTKSFDINGTIVELKEKGMFVIKKKDDNTYECSFYNPTSTNSTSNKESKISVTGYTITNQSVSNFKESDIHFELTK

SEQ ID NO: 289 - protein, 807 aa, Staphylococcus aureus; identical to SEQ ID NO: 258
  hyaluronan lyase
  strain USA300

SEQ ID NO: 290 - protein, 1066 aa, Streptococcus pneumoniae
  hyaluronan lyase
MQTKTKKLIVSLSSLVLSGFLLNHYMTIGAEETTTNTIQQSQKEVQYQQRDTKNLVENGDFGQTEDGSSPWTGSKAQGWSAWVDQKNSADASTRVIEAKDGAITISSHEKLRAALHRMVPIEAKKKYKLRFKIKTDNKIGIAKVRIIEESGKDKRLWNSATTSGTKDWQTIEADYSPTLDVDKIKLELFYETGTGTVSFKDIELVEVADQLSEDSQTDKQLEEKIDLPIGKKHVFSLADYTYKVENPDVASVKNGILEPLKEGTTNVIVSKDGKEVKKIPLKILASVKDAYTDRLDDWNGIIAGNQYYDSKNEQMAKLNQELEGKVADSLSSISSQADRTYLWEKFSNYKTSANLTATYRKLEEMAKQVTNPSSRYYQDETVVRTVRDSMEWMHKHVYNSEKSIVGNWWDYEIGTPRAINNTLSLMKEYFSDEEIKKYTDVIEKFVPDPEHFRKTTDNPFKALGGNLVDMGRVKVIAGLLRKDDQEISSTIRSIEQVFKLVDQGEGFYQDGSYIDHTNVAYTGAYGNVLIDGLSQLLPVIQKTKNPIDKDKMQTMYHWIDKSFAPLLVNGELMDMSRGRSISRANSEGHVAAVEVLRGIHRIADMSEGETKQCLQSLVKTIVQSDSYYDVFKNLKTYKDISLMQSLLSDAGVASVPRPSYLSAFNKMDKTAMYNAEKGFGFGLSLFSSRTLNYEHMNKENKRGWYTSDGMFYLYNGDLSHYSDGYWPTVNPYKMPGTTETDAKRADSDTGKVLPSAFVGTSKLDDANATATMDFTNWNQTLTAHKSWFMLKDKIAFLGSNIQNTSTDTAATTIDQRKLESGNPYKVYVNDKEASLTEQEKDYPETQSVFLESFDSKKNIGYFFFKKSSISMSKALQKGAWKDINEGQSDKEVENEFLTISQAHKQNRDSYGYMLIPNVDRATFNQMIKELESSLIENNETLQSVYDAKQGVWGIVKYDDSVSTISNQFQVLKRGVYTIRKEGDEYKIAYYNPETQESAPDQEVFKKLEQAAQPQVQNSKEKEKSEEEKNHSDQKNLPQTGEGQSILASLGFLLLGAFYLFRRGKNN

SEQ ID NO: 291 - protein, 1078 aa, Streptococcus pneumoniae
  hyaluronan lyase
  strain ATCC BAA-255/R6
MILQYVYWSVYMQTKTKKLIVSLSSLVLSGFLLNHYMTVGAEETTTNTIQQSQKEVQYQQRDTKNLVENGDFGQTEDGSSPWTGSKAQGWSAWVDQKNSSADASTRVIEAKDGAITISSPEKLRAAVHRMVPIEAKKKYKLRFKIKTDNKVGIAKVRIIEESGKDKRLWNSATTSGTKDWQTIEADYSPTLDVDKIKLELFYETGTGTVSFKDIELVEVADQPSEDSQTDKQLEEKIDLPIGKKHVFSLADYTYKVENPDVASVKNGILEPLKEGTTNVIVSKDGKEVKKIPLKILASVKDTYTDRLDDWNGIIAGNQYYDSKNEQMAKLNQELEGKVADSLSSISSQADRIYLWEKFSNYKTSANLTATYRKLEEMAKQVTNPSSRYYQDETVVRTVRDSMEWMHKHVYNSEKSIVGNWWDYEIGTPRAINNTLSLMKEYFSDEEIKKYTDVIEKFVPDPEHFRKTTDNPFKALGGNLVDMGRVKVIAGLLRKDDQEISSTIRSIEQVFKLVDQGEGFYQDGSYIDHTNVAYTGAYGNVLIDGLSQLLPVIQKTKNPIDKDKMQTMYHWIDKSFAPLLVNGELMDMSRGRSISRANSEGHVAAVEVLRGIHRIADMSEGETKQRLQSLVKTIVQSDSYYDVFKNLKTYKDISLMQSLLSDAGVASVPRTSYLSAFNKMDKTAMYNAEKGFGFGLSLFSSRTLNYEHMNKENKRGWYTSDGMFYLYNGDLSHYSDGYWPTVNPYKMPGTTETDAKRADSDTGKVLPSAFVGTSKLDDANATATMDFTNWNQTLTAHKSWFMLKDKIAFLGSNIQNTSTDTAATTIDQRKLESSNPYKVYVNDKEASLTEQEKDYPETQSVFLESSDSKKNIGYFFFKKSSISMSKALQKGAWKDINEGQSDKEVENEFLTISQAHKQNGDSYGYMLIPNVDRATFNQMIKELESSLIENNETLQSVYDAKQGVWGIVKYDDSVSTISNQFQVLKRGVYTIRKEGDEYKIAYYNPETQESAPDQEVFKKLEQAAQPQVQNSKEKEKSEEEKNHSDQKNLPQTGEGQSILASLGFLLLGAFYLFRRGKNN

SEQ ID NO: 292 - protein, 1067 aa, Streptococcus pneumoniae
  hyaluronan lyase
  strain D39/NCTC 7466 serotype 2
MQTKTKKLIVSLSSLVLSGFLLNHYMTVGAEETTTNTIQQSQKEVQYQQRDTKNLVENGDFGQTEDGSSPWTGSKAQGWSAWVDQKNSSADASTRVIEAKDGAITISSPEKLRAAVHRMVPIEAKKKYKLRFKIKTDNKVGIAKVRIIEESGKDKRLWNSATTSGTKDWQTIEADYSPTLDVDKIKLELFYETGTGTVSFKDIELVEVADQPSEDSQTDKQLEEKIDLPIGKKHVFSLADYTYKVENPDVASVKNGILEPLKEGTTNVIVSKDGKEVKKIPLKILASVKDTYTDRLDDWNGIIAGNQYYDSKNEQMAKLNQELEGKVADSLSSISSQADRIYLWEKFSNYKTSANLTATYRKLEEMAKQVTNPSSRYYQDETVVRTVRDSMEWMHKHVYNSEKSIVGNWWDYEIGTPRAINNTLSLMKEYFSDEEIKKYTDVIEKFVPDPEHFRKTTDNPFKALGGNLVDMGRVKVIAGLLRKDDQEISSTIRSIEQVFKLVDQGEGFYQDGSYIDHTNVAYTGAYGNVLIDGLSQLLPVIQKTKNPIDKDKMQTMYHWIDKSFAPLLVNGELMDMSRGRSISRANSEGHVAAVEVLRGIHRIADMSEGETKQRLQSLVKTIVQSDSYYDVFKNLKTYKDISLMQSLLSDAGVASVPRTSYLSAFNKMDKTAMYNAEKGFGFGLSLFSSRTLNYEHMNKENKRGWYTSDGMFYLYNGDLSHYSDGYWPTVNPYKMPGTTETDAKRADSDTGKVLPSAFVGTSKLDDANATATMDFTNWNQTLTAHKSWFMLKDKIAFLGSNIQNTSTDTAATTIDQRKLESSNPYKVYVNDKEASLTEQEKDYPETQSVFLESSDSKKNIGYFFFKKSSISMSKALQKGAWKDINEGQSDKEVENEFLTISQAHKQNGDSYGYMLIPNVDRATFNQMIKELESSLIENNETLQSVYDAKQGVWGIVKYDDSVSTISNQFQVLKRGVYTIRKEGDEYKIAYYNPETQESAPDQEVFKKLEQAAQPQVQNSKEKEKSEEEKNHSDQKNLPQTGEGQSILASLGFLLLGAFYLFRRGKNN

SEQ ID NO: 293 - protein, 805 aa, Streptococcus pyogenes
  hyaluronan lyase serotype M1
MNTYFCTHHKQLLLYSNLFLSFAMMGQGTAIYADTLTSNSEPNNTYFQTQTLTTTDSEKKVVQPQQKDYYTELLDQWNSIIAGNDAYDKTNPDMVTFHNKAEKDAQNIIKSYQGPDHENRTYLWEHAKDYSASANITKTYRNIEKIAKQITNPESCYYQDSKAIAIVKDGMAFMYEHAYNLDRENHQTTGKENKENWWVYEIGTPRAINNTLSLMYPYFTQEEILKYTAPIEKFVPDPTRFRVRAANFSPFEANSGNLIDMGRVKLISGILRKDDLEISDTIKAIEKVFTLVDEGNGFYQDGSLIDHVVTNAQSPLYKKGIAYTGAYGNVLIDGLSQLIPIIQKTKSPIKADKMATIYHWINHSFFPIIVRGEMMDMTRGRSISRFNAQSHVAGIEALRAILRIADMSEEPHRLALKTRIKTLVTQGNAFYNVYDNLKTYHDIKLMKELLSDTSVPVQKLDSYVASFNSMDKLALYNNKHDFAFGLSMFSNRTQNYEAMNNENLHGWFTSDGMFYLYNNDLGHYSENYWATVNPYRLPGTTETEQKPLEGTPENIKTNYQQVGMTGLSDDAFVASKKLNNTSALAAMTFTNWNKSLTLNKGWFILGNKIIFVGSNIKNQSSHKAYTTIEQRKENQKYPYCSYVNNQPVDLNNQLVDFTNTKSIFLESDDPAQNIGYYFFKPTTLSISKALQTGKWQNIKADDKSPEAIKEVSNTFITIMQNHTQDGDRYAYMMLPNMTRQEFETYISKLDIDLLENNDKLAAVYDHDSQQMHVIHYGKKATMFSNHNLSHQGFYSFPHPVRQNQQ

SEQ ID NO: 294 - protein, 780 aa, Streptococcus pyogenes
  hyaluronan lyase serotype M2  strain MGAS10270
MVYFYLVNQSTFIISFLYWRNVSVNTYFCTHHKQLLLYSNLFLSFAMIGQGTAIYADTLTSNSEPNNTYFQTQTLTTTDSEKKVVQPQQKDYYTELLDQWNSIIAGNDAYDKTNPDMVTFHNKAEKDAQNIIKSYQGPDHENRTYLWEHAKDYSASTNITKTYRNIEKIAKQITNPESCYYQDSKAIAIVKDGMAFMYEHAYNLNRENHQTTGKENKENWWVYEIGTPRAINNTLSLMYPYFTQEEILKYTAPIEKFVPDPTRFRVRAANFSPFEANSGNLIDMGRVKLISGILRKDDLEISDTIKAIEKVFTLVDEGNGFYQDGSLIDHVVTNTQSPLYKKGIAYTGAYGNVLIDGLSQLIPIIQKTKSPIEADKMATIYHWINHSFFPIIVRGEMMDMTRGRSISRFNAQSHVAGIEALRAILRIADMSEEPHRLELKTRIKTLVTQGNAFYNVYDNLKTYHDIKLMKELLSDTSVPVQKLDSYVASFNSMDKLALYNNKHDFAFGLSMFSNRTQNYEAMNNENLHGWFTSDGMFYLYNNDLGHYSENYWATVNPYRLPGTTETEQKPLEGTPENIKTNYQQVGMTSLSDDAFVASKKLNNTSALAAMTFTNWNKSLTLNKGWFILGNKIIFVGSNIKNQSSHKAYTTIEQRKENQKHPYCSYVNNQPVDLNNQLVDFTNTKSIFLESDDPAQNIGYYFFKPRTLSISKALQTGKWQNIKADDKSPEAIKEVSNTFITIMQNHTQEGDRYAYMMLPNMTRQEFETYISKLDIDLLENN

SEQ ID NO: 295 - protein, 868 aa, Streptococcus pyogenes
  hyaluronan lyase serotype M4 strain MGAS10750
MNTYFCTHHKQLLLYSNLFLSFAMMGQGTAIYADTLTSNSKPNNTYFQTQTLTTTDSEKKVVQPQQKDYYTELLDQWNSIIAGNDAYDKTNPDMVTFHNKAEKDAQNIIKSYQEPDHENRTYLWEHAKDYSASANITKTYRNIEKIAKQITNPESCYYQDSKAIAIVKDGMAFMYEHAYNLDRENHQTTGKENKENWWDYEIGTPRAINNTLSLMYPYFTQEEILKYTAPIEKFVPDPTRFRVRAANFPPFEANSGNLIDMGRVKLISGILRKDDLEISDTIKAIEKVFTLVDEGNGFYQDGSLIDHVVTNAQSPLYKKGIAYTGAYGNVLIDGLSQLIPIIQKTKSPIEADKMATIYHWINHSFFPIIVRGEMMDMTRGRSISRFNAQSHVAGIEALRAILRIADMSEEPHRLALKTRIKTLVTQGNVFYNVYDNLKTYHDIKLMKELLSDTSVPVQKLDSYVASFNSMDKLALYNNKHDFAFGLSMFSNRTQNYEAMNNENLHGWFTSDGMFYLYNNDLGHYSENYWATVNPYRLPGTTETEQKPLEGTPENIKTNYQQVGMTSLSDDAFVASKKLNNTSALAAMTFTNWNKSLTLNKGWFILGNKIIFVGSNIKNQSSHKAYTTIEQRKENQKHPYCSYVNNQPVDLNNQLVDFTNTKSIFLESDDPAQNIGYYFFKPTTLSISKALQTGKWQNIKADDKSPEAIKEVSNTFITIMQNHTQDGDRYAYMMLPNMTRQEFETYISKLDIDLLENNDKLAAVYDHDSQQMHVIHYEKKATTFSNHNLSHQGFYSFPHPVKQNQQQKLAHQGIAAKNNALNSHKIPHKRQRRLPRTGYQSSSLEFLGGALVASFNHITKPFRKKDLRI

SEQ ID NO: 296 - protein, 828 aa, Streptococcus pyogenes
  hyaluronan lyase
  serotype M6
MVYFYLVDQFTFIISFLYWRNLSVNTYFCTHHKQLLLYSNLFLSFAMMGQGTAIYADTLTSNSEPNNTYFQTQTLTTTDSEKKVVQPQQKDYYTELLDQWNSIIAGNDAYDKTNPDMVTFHNKAEKDAQNIIKSYQGPDHENRTYLWEHAKDYSASTNITKTYRNIEKIAKQITNPESCYYQDSKAIAIVKDGMAFMYEHAYNLDRENHQTTGKENKENWWVYEIGTPRAINNTLSLMYPYFTQEEILKYTAPIEKFVPDPTRFRVRAANFSPFEANSGNLIDMGRVKLISGILRKDDLEISDTIKAIEKVFTLVDEGNGFYQDGSLIDHVVTNAQSPLYKKGIAYTGAYGNVLIDGLSQLIPIIQKTKSPIEADKMATIYHWINHSFFPIIVRGEMMDMTRGRSISRFNAQSHVAGIEALRAILRIADMSEEPHRLALKTRIKTLVTQGNAFYNVYDNLKTYHDIKLMKELLSDTFVPVQKLDSYVASFNSMDKLALYNNKHDFAFGLSMFSNRTQNYEAMNNENLHGWFTSDGMFYLYNNDLGHYSENYWATVNPYRLPGTTETEQKPLEGTPENIKTDYQQVGMTSLSDDAFVASKKLNNTSALAAMTFTNWNKSLTLNKGWFILGNKIIFVGSNIKNQSSHKAYTTIEQRKENQKHPYCSYVNNQPVDLNNQLVDFTNTKSIFLESDDPAQNIGYYFFKPTTLSISKALQTGKWQNIKADDKSPEAIKEVSNTFITIMQNHTQDGDRYAYMMLPNMTRQEFETYISKLDIDLLENNDKLAAVYDHDSQQMHVIHYEKKATMFSNHNLSHQGFYSFPHPVKQNQQ

SEQ ID NO: 297 - protein, 556 aa, Streptococcus pyogenes
  hyaluronan lyase serotype M12 strain MGAS2096
MVYFYLVNQSTFIISFLYWRNLSVNTYFCTHHKQLLLYSNLFLSFAMMGQGTAIYADTLTSNSEPNNTYFQTQTLTTTDSEKKVVQPQQKDYYTELLDQWNSIIAGNDAYDKTNPDMVTFHNKAEKDAQNIIKSYQGPDHENRTYLGNMQRIIPLLLISRKLTAILKKISKMKSLMEDSTISTNGLTQQLKIYNDMDRVTYHNKGLDFAFGLSMTSKNVARYESINGENLKGWHTGAGMSYLYNSDVKHYRDNFWATADMKRLAGTTTLDNEEPKSTDVKKSSKTFVGGTKFDDQHASIGMDFENQDKTLTAKKSYFILNDKIVFLGTGIKSTDSSKNPVTTIENRKANDYKLYKDDTQTTNSDNQETNSLFLESTNSTQNNIGYHFLNESKITVKKESHTGKWSDINKSQKDIQKTDEYYEVTQKHSNTDSKYAYVLYPGLSKDVFKSKASKVTVVKQEDDFHVVKDNESVWAGINYSDSAKTFEINNTKVEVKAKGMFILTKKDDNTYECSFYNPESTNSVSDIESKISMTGYSIINKNTSTSNESGVRFELTK

SEQ ID NO: 298 - protein, 635 aa, Streptococcus pyogenes
  hyaluronan lyase serotype M12 strain MGAS2096
MAFMYEHAYNLNRENHQTTGKENKENWWVYEIGTPRAINNTLSLMYPYFTQEEILKYTAPIEKFVPDPTRFRVRAANFSPFEASSGNLIDMGRVKLISGILRKDDLEISDTIKAIEKVFTLVDEGNGFYQDGSLIDHVVTNAQSPLYKKGIAYTGAYGNVLIDGLSQLIPIIQKTKSPIEADKMATIYHWINHSFFPIIVRGEMMDMTRGRSISRFNAQSHVAGIEALRAILRIADMSEEPHRLALKTRIKTLVTQGNAFYNVYDNLKTYHDIKLMKELLSDTSVPVQKLDSYVASFNSMDKLALYNNKHDFAFGLSMFSNRTQNYEAMNNENLHGWFTSDGMFYLYNNDLGHYSENYWATVNPYRLPGTTETEQKPLEGTPENIKTNYQQVGMTSLSDDAFVASKKLNNTSALAAMTFTNWNKSLTLNKGWFILGNKIIFVGSNIKNQSSHKAYTTIEQRKENQKHPYCSYVNNQPVDLNNQLVDFTNTKSIFLESDDPAQNIGYYFFKPTTLSISKALQTGKWQNIKADDKSPEAIKEVSNTFITIMQNHTQDGDRYAYMMLPNMTRQEFETYISKLDIDLLENNDKLAAVYDHDSQQMHVIHYEKKATMFSNHNLSHQGFYSFPHPVKQNQQ

SEQ ID NO: 299 - protein, 828 aa, Streptococcus pyogenes
  hyaluronan lyase serotype M12 strain MGAS9429
MVYFYLVNQSTFIISFLYWRNLSVNTYFCTHHKQLLLYSNLFLSFAMMGQGTAIYADTLTSNSEPNNTYFQTQTLTTTDSEKKVVQPQQKDYYTELLDQWNSIIAGNDAYVKTNPDMVTFHNKAEKDAQNIIKSYQGPDHENRTYLWEHAKDYSASTNITKTYRNIEKIAKQITNPESCYYQDSKAIAIVKDGMAFMYEHAYNLNRENHQTTGKENKENWWVYEIGTPRAINNTLSLMYPYFTQEEILKYTAPIEKFVPDPTRFRVRAANFSPFEASSGNLIDMGRVKLISGILRKDDLEISDTIKAIEKVFTLVDEGNGFYQDGSLIDHVVTNAQSPLYKKGIAYTGAYGNVLIDGLSQLIPIIQKTKSPIEADKMATIYHWINHSFFPIIVRGEMMDMTRGRSISRFNAQSHVAGIEALRAILRIADMSEEPHRLALKTRIKTLVTQGNAFYNVYDNLKTYHDIKLMKELLSDTSVPVQKLDSYVASFNSMDKLALYNNKHDFAFGLSMFSNRTQNYEAMNNENLHGWFTSDGMFYLYNNDLGHYSENYWATVNPYRLPGTTETEQKPLEGTPENIKTNYQQVGMTSLSDDAFVASKKLNNTSALAAMTFTNWNKSLTLNKGWFILGNKIIFVGSNIKNQSSHKAYTTIEQRKENQKHPYCSYVNNQPVDLNNQLVDFTNTKSIFLESDDPAQNIGYYFFKPTTLSISKALQTGKWQNIKADDKSPEAIKEVSNTFITIMQNHTQDGDRYAYMMLPNMTRQEFETYISKLDIDLLENNDKLAAVYDHDSQQMHVIHYEKKATMFSNHNLSHQGFYSFPHPVKQNQQ

SEQ ID NO: 300 - protein, 828 aa, Streptococcus pyogenes
  hyaluronan lyase
  serotype M28
MVYFYLVNQFTFIISFLYRRNLSVNTYFCTHHKQLLLYSNLFLSFAMMGQGTAIYADTLTSNSEPNNTYFQTQMLTTTDSEKKVVQPQQKDYYTELLDQWNSIIAGNDAYDKTNPDMVTFHNKAEKDAQNIIKSYQGPDHENRTYLWEHAKDYSASANITKTYRNIEKIAKQITNPESCYYQDSKAIAIVKDGMAFMYEHAYNLDRENHQTTGKENKENWWVYEIGTPRAINNTLSLMYPYFTQEEILKYTAPIEKFVPDPTRFRVRAANFSPFEANSGNLIDMGRVKLISGILRKDDLEISDTIKAIEKVFTLVDEGNGFYQDGSLIDHVVTNAQSPLYKKGIAYTGAYGNVLIDGLSQLIPIIQKTKSSIEADKMATIYHWINHSFFPIIVRGEMMDMTRGRSISRFNAQSHVAGIEALRAILRIADMSEEPHRLALKTRIKTLVTQGNAFYNVYDNLKTYHDIKLMKELLSDTSVPVQKLDSYVASFNSMDKLALYNNKHDFAFGLSMFSNRTQNYEAMNNENLHGWFTSDGMFYLYNNDLGHYSENYWATVNPYRLPGTTETEQKPLEGTPENIKTNYQQVGMTSLSDDAFVASKKLNNTSALAAMTFTNWNKSLTLNKGWFILGNKIIFVGSNIKNQSSHKAYTTIEQRKENQKHPYHAYVNNQPVDLNNQLVDFTNTKSIFLESDDSAQNIGYYFFKPTTLSISKALQTGKWQNIKADDKSPEAIKEVSNTFITIMQNHTQDGDRYAYMMLPNMTRQEFETYISKLDIDLLENNDKLAAVYDHDSQQMHVIHYEKKATMFSNHNLSHQGFYSFPHPVKQNQQ

SEQ ID NO: 301 - protein, 522 aa, Streptococcus suis
  hyaluronan lyase
MGFFISQSKQHYGIRKYKVGVCSALIALSILGTRVAANQLPSTETASPQSSQLVETTPETTEAVNLTTEAVMTSEVSSEVSPVTSTETQPSSTAAETLASPQAVQATKEEEKNLVANGEFASTTAASGNWADPAATNWETWIPANVKKENGQVRIDEGRLHISSTASYRVAVHQTVDVDPNKRYLFSYNVETKDLKGSGVRVRLRSLTAEGKDLSPQEFAYTPYKNGSQAEHIEQILTVSPETRKLKVELFFENSVGQAWLDNISLVEYVEKTPETPEPSLELVQPETGQISLASNKVYLPVRPDLTYRIADAAVAIVEKNMIRPLAAGKTQVDVYDKDTKLSSFELTVTEHQATVFDTLRNNWEDISLANKRYQSNDTQMKAFLGRLDAGVASSLKKWVEPTNQGKTIFNDIDFSKSSHLTTVYRRLEQMAQVVENPDSAYYHDRSLIDLVRKGMNWLYTNVYNENKSIDGNWWDYEIGTPRAVVNTLIYMHPYFSQEEILTYTKPISKFVPDPTTISVKH

SEQ ID NO: 302 - protein, 1164 aa, Streptococcus suis
  hyaluronan lyase
MGFFISQSKQHYGIRKYKVGVCSALIALSILGTRVAANQLPSTETASPQSSQLVETTPETTEAVMTSEVSSEVSPVTSTETQPSSTTAETLASPQAVQATKEEKNLVANGEFISTTAPSGNWKELAATNWETWIPANVKKENGQVRIDEGRLHISSTASYRVAVHQTVDVDPNKRYLFSYDVETKDLKGSGVRVRLRSLTAEGKDLSPQEFAYTPYKNGSQAEHIEQILTVSPETRKLKVELFFENSVGQAWLDNISLVEYVEKTPETPEQSPELVQPETGQISLASNKVYLPVRPDLTYRIADAAVATVEKNMIRPLAAGKTQVDVYDKDTKLSSFELIVTEHQATVFDTLRNNWEDISLANKRYQSNDAQMKAFLGRLDAGVASSLEKWVEPTEQSKTIFNDIDFSKSSHLTTVYRRLEQMAQVVENPDSAYYHDRSLIDLVRKGMNWLYANVYNENKSIDGNWWDYEIGTSRAVVNTLIYMHPYFSQEEILTYTKPISKFVPDPTTIRKTLTNPVPAVGGNQTDLSKVAILEGALREDADRVRAGAQGLTTIMKFVDKGEGFYRDGSFIDHTNVAYTGAYGNVLIEGFSQLLPVIQPTEFALKEEQTNILYEWIEKAFMPILVRGELMDMTRGRSISRATGESHVQAMEILRSLVRIAESAQPEQKTKLLSFVKAQLTSDTFYDSYRSLKSYKDIDLVNKLLADNQIPAEVDKDYIAAFNNMDKFVYRSAQEGFTFALSMYSSRTQNYEDMNNENRKGWYTADGMVYLYNDDLSHYSNHYWATVDPYRLPGTTTTKDKREDGSGEVTLASDFVGASQLGNRLATIAMDFNNWNNSLTARKAWIVLGNKIVFLGTDIQHQSAQGAETTIENRKLLTGEKYSYYINGQPVDLSKEVVTDKTQSFYMTNGKDNQSIGYVFLNQLPTHAKLDQRTGKWSDINYNQSKEEVSNSFVSLWHEHAQTSSNYAYVLVPNQSMEKVNQAAASVKLLHQDRDLQVVYDQEQNVWGVVKYTDTAYKLTDDITLTDAGLYTIQKVEGGYRIAFYNPSTRTVKNGIELTKAGSSLTVEMEPTAAYPSTVWKVTMPEGSDKQTGSVEKTEKEEKQLKENQPSSEVKQVVHHAAEKTKPSKPRLPQTGEEASLGLGFLGLLTLGAVVDFKCRRSHS

SEQ ID NO: 303 - protein, 1164 aa, Streptococcus suis
  hyaluronan lyase
MGFFISQSKQHYGIRKYKVGVCSALIALSILGTRVAANQLPSTETASPQSSQLVETTPETTEAVMTSEVSSEVSPVTSTETQPSSTTAETLASPQAVQATKEEKNLVANGEFISTTAPSGNWKELAATNWETWIPANVKKENGQVRIDEGRLHISSTASYRVAVHQTVDVDPNKRYLFSYDVETKDLKGSGVRVRLRSLTAEGKDLSPQEFAYTPYKNGSQAEHIEQILTVSPETRKLKVELFFENSVGQAWLDNISLVEYVEKTPETPEQSPELVQPETGQISLASNKVYLPVRPDLTYRIADAAVATVEKNMIRPLAAGKTQVDVYDKDTKLSSFELIVTEHQATVFDTLRNNWEDISLANKRYQSNDAQMKAFLGRLDAGVASSLEKWVEPTEQSKTIFNDIDFSKSSHLTTVYRRLEQMAQVVENPDSAYYHDRSLIDLVRKGMNWLYTNVYNENKSIDGNWWDYEIGTPRAVVNTLIYMHPYFSQEEILTYTKPISKFVPDPTTIRKTLTNPVPAVGGNQTDLSKVAILEGALREDADRVRAGAQGLTTIMKFVDKGEGFYRDGSFIDHTNVAYTGAYGNVLIEGFSQLLPVIQPTEFALKEEQTNILYEWIEKAFMPILVRGELMDMTRGRSISRATGESHVQAMEILRSLVRIAESAQPEQKTKLLSFVKAQLTSDTFYDSYRSLKSYKDIDLVNKLLADNQIPAEVDKDYIAAFNNMDKFVYRSAQEGFTFALSMYSSRTQNYEDMNNENRKGWYTADGMVYLYNDDLSHYSNHYWATVDPYRLPGTTTTKDKREDGSGEVTLASDFVGASQLGNRLATIAMDFNNWNNSLTARKAWIVLGNKIVFLGTDIQHQSAQGAETTIENRKLLTGEKYSYYINGQPVDLSKEVVTDKTQSFYMTNGKDNQSIGYVFLNQLPTHAKLDQRTGKWSDINYNQSKEEVSNSFVSLWHEHAQTSSNYAYVLVPNQSMEKVNQAAASVKLLHQDRDLQVVYDQEQNVWGVVKYTDTAYKLTDDITLTDAGLYTIQKVEGGYRIAFYNPSTRTVKNGIELTKAGSSLTVEMEPTAAYPSTVWKVTMPEGSDKQTGSVEKTEKEEKQLKENQPSSEVKQVVHHAAEKTKPSKPRLPQTGEEASLGLGFLGLLTLGAVVDFKCRRSHS

SEQ ID NO: 304 - protein, 802 aa, Vibrio fischeri
  hyaluronan lyase
  strain ATCC 700601 / ES114
MYMIKKHRLNTIALSMLFLFTGNAYAAKNTQTPQYLPSDFEQVRENWAENYLGDPAITFDQTLKNMVTSTNSSAQKHWDSMTPQPNASGIWDDLPLIDKDTTLGPNIRNSYQRLFTMAKAYRLRDGNLENNQLMLNDIMTAMNYINQNFYFVNQLEYGNWWQWELAIPKDIHNILVLLFDDIKDNYQTIITNHLNATRYFTPDPTHLGVSPGAAESTNPNYRESTGGNRTDNAQVVLIRGMLENNSEEISQAIAALPAVIEYVSEGDGYYTDGSFLQHSDIAYNGTYGNVLLGGLGIQMNAVAGSPWSMDNQTISNVYNIINQSYEPLLYKGAMMDMVNGRSISRSAEQNHDVGLNIVNSMLFYTNGPDSDKNKQLSSLIKTQITDDTYQNFFDKIYYVSTYQAAQHIVNDPTVSLKDPLIGNFSYPSMDRIVHRRTDWAFALAMHSYRIGNYECMNGENLKGWFTGDGMIYLYNDQLDHYTGYWPTVNASRMPGTTVDSQIMADCSGERVGGNVNTNMQWVGSTSLNNYGIAGMQFYNWSDTLSAYKSWFMFDNEVVMLGSNIKDQSNANNITTIENRKRLAETKLFIDGTEQAALPYQGAPATFSIRNKTLANSDLSYVMLTPKTISISQNDVDGNWSDIGNSKGDVSDSYLQATLTQVDQADYQYALLPNQNNDTVQNYAQHPDVTVLRQDEQAHAVQENTLNIIAANNWKNNPVNITDTITLNSMMGFMIKEESSNTFTVAVSEPIQTIDSVNFTFDKQGIVIKEDIENRVVLNGTTLTINTSGLQGQSYSFQVTIQD

SEQ ID NO: 305 - protein, 517 aa, Synechococcus species
  hyaluronan lyase
  strain RCC307
MGAPAIPKVPRSPSKSEHTTRPNSGESEVVRQAEELFEQTLVNVRGQLAGAVAALESSVHDSELNYGEIFLRDNVPVMVYLLLRGRFEIVRHFLDLCLELQSRSYRTRGVFPTSFVEEDDKILADYGQRSIGRITSVDASLWWPVLCWMYVRASGDTSYGTSPKVQRAVQLLLDLVLQPSFYEPPVLFVPDCAFMIDRPMDVWGAPLEVEVLLFGCLKSCCQLMSLVEGGGHGGPLIQQRLELTRTWMRDLRVYLLNHYWVTSKTMQVLRRRPTEQYGDYQSRNEFNVQPEVIPHWLQEWLDDRGGYLIGNMRTGRPDFRFYSLGNALGSLFGLLTGPQQLALFRLVIHNRQHLMAEMPMRICHPPMDQDEWITNTGMDPKNWPWSYHNGGHWPSLLWPMAAAVLMHQRLYPNDDLLLLGQTRTMLEECYWQQLNQLPRQQWAEYFDGPTGTWVGQQARINQTWTIVGFLLLHHLMRKAPQDVKLLDLDDVGPLRLSFQDQHEKSSTDERKSFLKNY

SEQ ID NO: 306 - protein, 1021 aa, Proteus vulgaris
  chondroitin-sulfate-ABC endolyase
MPIFRFTALAMTLGLLSAPYNAMAATSNPAFDPKNLMQSEIYHFAQNNPLADFSSDKNSILTLSDKRSIMGNQSLLWKWKGGSSFTLHKKLIVPTDKEASKAWGRSSTPVFSFWLYNEKPIDGYLTIDFGEKLISTSEAQAGFKVKLDFTGWRAVGVSLNNDLENREMTLNATNTSSDGTQDSIGRSLGAKVDSIRFKAPSNVSQGEIYIDRIMFSVDDARYQWSDYQVKTRLSEPEIQFHNVKPQLPVTPENLAAIDLIRQRLINEFVGGEKETNLALEENISKLKSDFDALNIHTLANGGTQGRHLITDKQIIIYQPENLNSQDKQLFDNYVILGNYTTLMFNISRAYVLEKDPTQKAQLKQMYLLMTKHLLDQGFVKGSALVTTHHWGYSSRWWYISTLLMSDALKEANLQTQVYDSLLWYSREFKSSFDMKVSADSSDLDYFNTLSRQHLALLLLEPDDQKRINLVNTFSHYITGALTQVPPGGKDGLRPDGTAWRHEGNYPGYSFPAFKNASQLIYLLRDTPFSVGESGWNNLKKAMVSAWIYSNPEVGLPLAGRHPFNSPSLKSVAQGYYWLAMSAKSSPDKTLASIYLAISDKTQNESTAIFGETITPASLPQGFYAFNGGAFGIHRWQDKMVTLKAYNTNVWSSEIYNKDNRYGRYQSHGVAQIVSNGSQLSQGYQQEGWDWNRMEGATTIHLPLKDLDSPKPHTLMQRGERGFSGTSSLEGQYGMMAFNLIYPANLERFDPNFTAKKSVLAADNHLIFIGSNINSSDKNKNVETTLFQHAITPTLNTLWINGQKIENMPYQTTLQQGDWLIDSNGNGYLITQAEKVNVSRQHQVSAENKNRQPTEGNFSSAWIDHSTRPKDASYEYMVFLDATPEKMGEMAQKFRENNGLYQVLRKDKDVHIILDKLSNVTGYAFYQPASIEDKWIKKVNKPAIVMTHRQKDTLIVSAVTPDLNMTRQKAATPVTINVTINGKWQSADKNSEVKYQVSGDNTELTFTSYFGIPQEIKLSPLP

SEQ ID NO: 307 - protein, 700 aa, Pedobacter heparinus
  chondroitin AC lyase
MKKLFVTCIVFFSILSPALLIAQQTGTAELIMKRVMLDLKKPLRNMDKVAEKNLNTLQPDGSWKDVPYKDDAMTNWLPNNHLLQLETIIQAYIEKDSHYYGDDKVFDQISKAFKYWYDSDPKSRNWWHNEIATPQALGEMLILMRYGKKPLDEALVHKLTERMKRGEPEKKTGANKTDIALHYFYRALLTSDEALLSFAVKELFYPVQFVHYEEGLQYDYSYLQHGPQLQISSYGAVFITGVLKLANYVRDTPYALSTEKLAIFSKYYRDSYLKAIRGSYMDFNVEGRGVSRPDILNKKAEKKRLLVAKMIDLKHTEEWADAIARTDSTVAAGYKIEPYHHQFWNGDYVQHLRPAYSFNVRMVSKRTRRSESGNKENLLGRYLSDGATNIQLRGPEYYNIMPVWEWDKIPGITSRDYLTDRPLTKLWGEQGSNDFAGGVSDGVYGASAYALDYDSLQAKKAWFFFDKEIVCLGAGINSNAPENITTTLNQSWLNGPVISTAGKTGRGKITTFKAQGQFWLLHDAIGYYFPEGANLSLSTQSQKGNWFHINNSHSKDEVSGDVFKLWINHGARPENAQYAYIVLPGINKPEEIKKYNGTAPKVLANTNQLQAVYHQQLDMVQAIFYTAGKLSVAGIEIETDKPCAVLIKHINGKQVIWAADPLQKEKTAVLSIRDLKTGKTNRVKIDFPQQEFAGATVELK

SEQ ID NO: 308 - protein, 844 aa, Victivallis vadensis
  chondroitin AC lyase
  ATCC BAA-548
MHRKIVFPLFVLLFTAFAAFAASQPQWKWRQSKYCRITEHAGKKLLTVAIPADAPEISRRNTADTPVGLTCFEGQPIEFSIRLRNSGISRPDNLHNGIKFQLYFRDGNGTERWTQAEIPHEPFPWRRFRFSERIPADATSGTLRLGLQGSSGNVEFDLDSLQIRPLDPELSPVPPTPEQIRECELIESRLRAGLPAQQPPPGPEVKKLLERQNGDGTFRDLDYSARNRSIWPAARHLKRTFELALARATPGHALYRDPAAGEAVRKAVAWWAERQPQNGNWWWNDMYVPKILGNILLLSPELFPDGPRRRAALNVCRQACFLSRYTGNNRVFIAANIFCRALLERNLPVMDRAAAVLSEEIRFAPAEHKTAWSFGGIRADGCYHQHGPQIQFGNYGGEFLANIAYWSNILKETHWELSPEQWRIMRHLTFNGFQWVLWRGRMDLLACGRQLGRNAAETKGERTLNAFAQLRNADPGDRAPYDAALRRNRDGENTLTGNRHFWNSDYMVHRRPTWYASVRMNSVRVRPIEDDTNWDNALGRYFSDGACLVMRSGREYENITACWDWTRLPGTTLPKTPVYTGEDARRFGLKIGGGDLPRWTHSRNWRQLGETGFVGGVTDGERGAAVYTQDLDGVRARKAWFFDRDAIYCLGSGITSTSPYEVATTVNSCLRNGEIQQGDGWFRHDGIGYRGENLKLTAGPRTGDWRYVEGGLTRPVPETKELFTLTVEHGVKPRNASYIYTILPGATPEETAGTPPGRVLRNTPECQAVEFADGVRAAIFYEPGRLDDFETDTPGVFLIGKGTVHAADPTGRHSSFTLKLNGVSRKVPLPAGEFAGQSVKIVLK

SEQ ID NO: 309 - DNA, 4344 bp, Homo sapiens
  MMP-24
gggatgccgaggagccggggcggccgcgccgcgccggggccgccgccgccgccgccgccgccgggccaggccccgcgctggagccgctggcgggtccctgggcggctgctgctgctgctgctgcccgcgctctgctgcctcccgggcgccgcgcgggcggcggcggcggcggcgggggcagggaaccgggcagcggtggcggtggcggtggcgcgggcggacgaggcggaggcgcccttcgccgggcagaactggttaaagtcctatggctatctgcttccctatgactcacgggcatctgcgctgcactcagcgaaggccttgcagtcggcagtctccactatgcagcagttttacgggatcccggtcaccggtgtgttggatcagacaacgatcgagtggatgaagaaaccccgatgtggtgtccctgatcacccccacttaagccgtaggcggagaaacaagcgctatgccctgactggacagaagtggaggcaaaaacacatcacctacagcattcacaactataccccaaaagtgggtgagctagacacgcggaaagctattcgccaggctttcgatgtgtggcagaaggtgaccccactgacctttgaagaggtgccataccatgagatcaaaagtgaccggaaggaggcagacatcatgatcttttttgcttctggtttccatggcgacagctccccatttgatggagaagggggattcctggcccatgcctacttccctggcccagggattggaggagacacccactttgactccgatgagccatggacgctaggaaatgccaaccatgacgggaacgacctcttcctggtggctgtgcatgagctgggccacgcgctgggactggagcactccagcgaccccagcgccatcatggcgcccttctaccagtacatggagacgcacaacttcaagctgccccaggacgatctccagggcatccagaagatctatggacccccagccgagcctctggagcccacaaggccactccctacactccccgtccgcaggatccactcaccatcggagaggaaacacgagcgccagcccaggccccctcggccgcccctcggggaccggccatccacaccaggcaccaaacccaacatctgtgacggcaacttcaacacagtggccctcttccggggcgagatgtttgtctttaaggatcgctggttctggcgtctgcgcaataaccgagtgcaggagggctaccccatgcagatcgagcagttctggaagggcctgcctgcccgcatcgacgcagcctatgaaagggccgatgggagatttgtcttcttcaaaggtgacaagtattgggtgtttaaggaggtgacggtggagcctgggtacccccacagcctgggggagctgggcagctgtttgccccgtgaaggcattgacacagctctgcgctgggaacctgtgggcaagacctactttttcaaaggcgagcggtactggcgctacagcgaggagcggcgggccacggaccctggctaccctaagcccatcaccgtgtggaagggcatcccacaggctccccaaggagccttcatcagcaaggaaggatattacacctatttctacaagggccgggactactggaagtttgacaaccagaaactgagcgtggagccaggctacccgcgcaacatcctgcgtgactggatgggctgcaaccagaaggaggtggagcggcggaaggagcggcggctgccccaggacgacgtggacatcatggtgaccatcaacgatgtgccgggctccgtgaacgccgtggccgtggtcatcccctgcatcctgtccctctgcatcctggtgctggtctacaccatcttccagttcaagaacaagacaggccctcagcctgtcacctactataagcggccagtccaggaatgggtgtgagcagcccagagccctctctatccacttggtctggccagccaggcccttcctcaccagggtctgaggggcagctctggccagtgctcaccagggccagcagggccctaggctggggtcgtacagctgaagtggtgggtgcattggcctaggctgagcgtggggcagggaattatgggggctgtgccccagggtgggtgtctggcacccagctgccagccttctgtcctgggcaaactactccctacttaagggaataggccaggctccatccggaggcagggaccatgccaggaggagcccctgtggtcacggcatcctgtggtgtccatgaggtaccacagctccactcctggctggaacccagcaccctctgtgggaagccagcactagctctcatcccccatccgggagataccaccagtcctggtccccttttgccaacacctgctggtcagatgtccccctacccccaccccactgtcctccaaggctacaggacccctgcttctgacacagtgagcaacaagcctgggtttccctgctggcagacggcagatccctcaggaaacctgctccacttgtcagggtctcttcggagacccaggatttagggtcacatgctgcaggcagggctgtggcccagctgggtctgacaaggacccagctgtcacatcgtgaatatttaaatgtcctgtcactactgtcccattttgcaaaggctgcttgaggctttaggtgaactagaggtgactgtcttggtgatgaggccagcatagcggccctcccccaggcgacaaggaccaaggtgctgctaaggccactctagcgcccagacaccccagtagctgagctctgctcctatggctacagagctggggcagaagctgaccccatttctggaggaagatccgagtttgtgaccgtcctccactcccctctattgtcactgtccccagctttgctccagtctgtcacttgcagcctggagctcagcctcaccagttaggtgaggcagagatggctgcagggccaacactggcagagcctgggagtccttcggaaggggaccagggcgtctgaagtgctcagtgcccccactactctgaggccgactccagctactctgaggccgactcaatctctcggctggaagcagtgttttcccagagcttggcccttgctgacctcgctcactgggcccatcttcccacactgctcttagaaggacacccctaccggtagcagccccaagctgagggggctccctttttgaccttcactggcccgcccttcactgtctccagcaggagttcctagggcttggcctgccttgctccacagtacggcggaggcagccctgcttgtcactgaggagccctagacaaggccaatgggttcatcaatgcccactggctctctgccaaagccaaaaaggtgtcaggcagtctccagcgtgctggccgggtctcggatgccacccctgctcactgagcctgcatgggccttgcccccgaccctgtggtctctgggattggggtcggcttaccctgtagcacagacagggactcctgctgccctgggagctgtctcaagcaaaatctcttgtcccagaggtgcccatgtgggtccgctgtgtcccctgtcatcatccttgttttttctcattttggccaagggcaggctccctgggacaggcagggaacaactgcggagatattagtgattcataggtttgtacagtgttttatactttgcaaagcactttattagctcacacctgtccactcacatgaaactcgtgttaggccctgggaggccgacggtaactctcaccgtgccctcagatgaagcacagagaggttgttacttgcccgggccatccagtgggctggctgggtcttgtgtccccatctgtggacccctctagggtctgagatgagatgagaagtgtctcctgtatccacctcttcctggcctcccttcccccacttcctggtccctgtccactcctcaggttggtgctctcacttcttgaaagctctaggcacccccgcctcccgccaggctccccattggctcctggcaggccagctgagaatgaacaggagatggaggcaggcagcccaggctgcagaggtgagggatgtggggccaggcccagagggctcagcctagaggcttccaatctcagattctcctgcctgtggtcatctgtttgtccatcaccccaggacagggcagacagaggggcaaagcactgggggccccagagcctagcttcccctcagcctgggggacatcacagcatttcagtgtcagtcacattttaaactgatcagcctttgtataatgttttttaaatcatttctaaataaaacagaaatacagagtgaaaaaaaaaaa

SEQ ID NO: 310 - protein, 645 aa, Homo sapiens
  MMP-24 precursor
MPRSRGGRAAPGPPPPPPPPGQAPRWSRWRVPGRLLLLLLPALCCLPGAARAAAAAAGAGNRAAVAVAVARADEAEAPFAGQNWLKSYGYLLPYDSRASALHSAKALQSAVSTMQQFYGIPVTGVLDQTTIEWMKKPRCGVPDHPHLSRRRRNKRYALTGQKWRQKHITYSIHNYTPKVGELDTRKAIRQAFDVWQKVTPLTFEEVPYHEIKSDRKEADIMIFFASGFHGDSSPFDGEGGFLAHAYFPGPGIGGDTHFDSDEPWTLGNANHDGNDLFLVAVHELGHALGLEHSSDPSAIMAPFYQYMETHNFKLPQDDLQGIQKIYGPPAEPLEPTRPLPTLPVRRIHSPSERKHERQPRPPRPPLGDRPSTPGTKPNICDGNFNTVALFRGEMFVFKDRWFWRLRNNRVQEGYPMQIEQFWKGLPARIDAAYERADGRFVFFKGDKYWVFKEVTVEPGYPHSLGELGSCLPREGIDTALRWEPVGKTYFFKGERYWRYSEERRATDPGYPKPITVWKGIPQAPQGAFISKEGYYTYFYKGRDYWKFDNQKLSVEPGYPRNILRDWMGCNQKEVERRKERRLPQDDVDIMVTINDVPGSVNAVAVVIPCILSLCILVLVYTIFQFKNKTGPQPVTYYKRPVQEWV

SEQ ID NO: 311 - protein, 490 aa, Homo sapiens
  MMP-24 mature
YALTGQKWRQKHITYSIHNYTPKVGELDTRKAIRQAFDVWQKVTPLTFEEVPYHEIKSDRKEADIMIFFASGFHGDSSPFDGEGGFLAHAYFPGPGIGGDTHFDSDEPWTLGNANHDGNDLFLVAVHELGHALGLEHSSDPSAIMAPFYQYMETHNFKLPQDDLQGIQKIYGPPAEPLEPTRPLPTLPVRRIHSPSERKHERQPRPPRPPLGDRPSTPGTKPNICDGNFNTVALFRGEMFVFKDRWFWRLRNNRVQEGYPMQIEQFWKGLPARIDAAYERADGRFVFFKGDKYWVFKEVTVEPGYPHSLGELGSCLPREGIDTALRWEPVGKTYFFKGERYWRYSEERRATDPGYPKPITVWKGIPQAPQGAFISKEGYYTYFYKGRDYWKFDNQKLSVEPGYPRNILRDWMGCNQKEVERRKERRLPQDDVDIMVTINDVPGSVNAVAVVIPCILSLCILVLVYTIFQFKNKTGPQPVTYYKRPVQEWV

SEQ ID NO: 312 - DNA, 3565 bp, Homo sapiens
  MMP-25
gattcccgggcccacccgacccagcggcgcgaccctggccctccgggaccctccgctgactccaccgcgcacttcccgggacccccacacacatcccagccctccggccgatccctccctactcggtgccgggtgccccccgccctctccaggcccggatctcctcccccaggtccccggggcggccccagccaggcccccttcgaaccccgccggcggcccgggctggggcgcaccatgcggctgcggctccggcttctggcgctgctgcttctgctgctggcaccgcccgcgcgcgccccgaagccctcggcgcaggacgtgagcctgggcgtggactggctgactcgctatggttacctgccgccaccccaccctgcccaggcccagctgcagagccctgagaagttgcgcgatgccatcaaagtcatgcagaggttcgcggggctgccggagaccggccgcatggacccagggacagtggccaccatgcgtaagccccgctgctccctgcctgacgtgctgggggtggcggggctggtcaggcggcgtcgccggtacgctctgagcggcagcgtgtggaagaagcgaaccctgacatggagggtacgttccttcccccagagctcccagctgagccaggagaccgtgcgggtcctcatgagctatgccctgatggcctggggcatggagtcaggcctcacatttcatgaggtggattccccccagggccaggagcccgacatcctcatcgactttgcccgcgccttccaccaggacagctaccccttcgacgggttggggggcaccctagcccatgccttcttccctggggagcaccccatctccggggacactcactttgacgatgaggagacctggacttttgggtcaaaagacggcgaggggaccgacctgtttgccgtggctgtccatgagtttggccacgccctgggcctgggccactcctcagcccccaactccattatgaggcccttctaccagggtccggtgggcgaccctgacaagtaccgcctgtctcaggatgaccgcgatggcctgcagcaactctatgggaaggcgccccaaaccccatatgacaagcccacaaggaaacccctggctcctccgccccagcccccggcctcgcccacacacagcccatccttccccatccctgatcgatgtgagggcaattttgacgccatcgccaacatccgaggggaaactttcttcttcaaaggcccctggttctggcgcctccagccctccggacagctggtgtccccgcgacccgcacggctgcaccgcttctgggaggggctgcccgcccaggtgagggtggtgcaggccgcctatgctcggcaccgagacggccgaatcctcctctttagcgggccccagttctgggtgttccaggaccggcagctggagggcggggcgcggccgctcacggagctggggctgcccccgggagaggaggtggacgccgtgttctcgtggccacagaacgggaagacctacctggtccgcggccggcagtactggcgctacgacgaggcggcggcgcgcccggaccccggctaccctcgcgacctgagcctctgggaaggcgcgcccccctcccctgacgatgtcaccgtcagcaacgcaggtgacacctacttcttcaagggcgcccactactggcgcttccccaagaacagcatcaagaccgagccggacgccccccagcccatggggcccaactggctggactgccccgccccgagctctggtccccgcgcccccaggccccccaaagcgacccccgtgtccgaaacctgcgattgtcagtgcgagctcaaccaggccgcaggacgttggcctgctcccatcccgctgctcctcttgcccctgctggtggggggtgtagcctcccgctgatggggggagccatccagaccgaacagcgccctccacggccgagtcccccgccgctggacctggtcgggggttgtgaggcgctgcggaggccccttgtctgttcccacggacgggggctcgggcgcggactaagcaggggggatctcccgcgcaggggcggcggcggcggggaccggtcgcctggcgctgggctcagtctcctcagggtctgagaccccggcgctgccaccggaacccgccttcaggggcgcacgcgcgctgggaccatgcgtcggtcgtcgcccccgtcgttccctcccggctgccgccagggggcggtcggaccccgcctcccgagcccggggaggggcggggaggacaaggggcgggcccgcggcctcacccggagggacggcagccccggtcgcgcgctggccccgcaggaccttccttttccaggaagagccagcttttctcggagcgcagtcctgggactctccgcagccccgccccgcctggccactgcgtctggcattcctgggtcgttagaggacaggcctgactgcgaagctgtgccttgcccctctcccacccgcagtttctcaccccgttctgctcccacaaggcccccctacagtcactgccacactggtggggacctgggacccagacccggaaccagcccagatatcacccctgaggacccatgcgccacgtcctgggtggtggaatcagtggctggagggacgacccttgctctccaggctgttaaccttttccgttgctcccccgccacccacctcctcctccccaggccacccaacttgggcacctccctgggcccagaactgccttccattcaatggggaacccttctatccccaagaaccccttccctgcttgcaccctggagagaacagcttgactcccatcaactcaacgctggtggaaagacagggaccgaaccctggctcaggcctggtcattgcctcctcagcactccctcctgggaggccttagctctagagtgaggggtgggtggaacctgggggcacctcgttcaccctgtccccactccccacagttttaggatctaaatgattgcctctggaactattcttctagactatcccacatcagaatcactgggaaatttaagtttgcagatcccacactcaccctgaatcctcactcagggtggggtcaggaatctgcattttaactagtcgcggggattgtggggggcagtagctggctgtttcgtggcatttctgtggctctgcagtgttcctccaccccaggaccaatatgttcaggccacaccgatggcctgaaccccatgggtagagtcacttaggggccacttcctaagttgctgtccagcctcagtgaccccctagtgcttcctggagctgaggctgtgggcggctgtcccagcaaccatgcgaggggttgccccagttgctcatacaaacagatcagcatgaggacagaaggcaggagactttggtcagttacctgggaattctgggctgccaggaaacgatttgggcctctgtcagtttcttttccatgtatgaggagggggaaatttgtatattagaaacttattcatcccactcaggacaataaaaacgaatgtacaaaaaaaaaaaaaaaa

SEQ ID NO: 313 - protein, 562 aa, Homo sapiens
  MMP-25 precursor
MRLRLRLLALLLLLLAPPARAPKPSAQDVSLGVDWLTRYGYLPPPHPAQAQLQSPEKLRDAIKVMQRFAGLPETGRMDPGTVATMRKPRCSLPDVLGVAGLVRRRRRYALSGSVWKKRTLTWRVRSFPQSSQLSQETVRVLMSYALMAWGMESGLTFHEVDSPQGQEPDILIDFARAFHQDSYPFDGLGGTLAHAFFPGEHPISGDTHFDDEETWTFGSKDGEGTDLFAVAVHEFGHALGLGHSSAPNSIMRPFYQGPVGDPDKYRLSQDDRDGLQQLYGKAPQTPYDKPTRKPLAPPPQPPASPTHSPSFPIPDRCEGNFDAIANIRGETFFFKGPWFWRLQPSGQLVSPRPARLHRFWEGLPAQVRVVQAAYARHRDGRILLFSGPQFWVFQDRQLEGGARPLTELGLPPGEEVDAVFSWPQNGKTYLVRGRQYWRYDEAAARPDPGYPRDLSLWEGAPPSPDDVTVSNAGDTYFFKGAHYWRFPKNSIKTEPDAPQPMGPNWLDCPAPSSGPRAPRPPKATPVSETCDCQCELNQAAGRWPAPIPLLLLPLLVGGVASR

SEQ ID NO: 314 - protein, 455 aa, Homo sapiens
  MMP-25 mature
YALSGSVWKKRTLTWRVRSFPQSSQLSQETVRVLMSYALMAWGMESGLTFHEVDSPQGQEPDILIDFARAFHQDSYPFDGLGGTLAHAFFPGEHPISGDTHFDDEETWTFGSKDGEGTDLFAVAVHEFGHALGLGHSSAPNSIMRPFYQGPVGDPDKYRLSQDDRDGLQQLYGKAPQTPYDKPTRKPLAPPPQPPASPTHSPSFPIPDRCEGNFDAIANIRGETFFFKGPWFWRLQPSGQLVSPRPARLHRFWEGLPAQVRVVQAAYARHRDGRILLFSGPQFWVFQDRQLEGGARPLTELGLPPGEEVDAVFSWPQNGKTYLVRGRQYWRYDEAAARPDPGYPRDLSLWEGAPPSPDDVTVSNAGDTYFFKGAHYWRFPKNSIKTEPDAPQPMGPNWLDCPAPSSGPRAPRPPKATPVSETCDCQCELNQAAGRWPAPIPLLLLPLLVGGVASR

SEQ ID NO: 315 - DNA, 1919 bp, Homo sapiens
  MMP-21
atgctcgccgcctccatcttccgtccgacactgctgctctgctggctggctgctccctggcccacccagcccgagagtctcttccacagccgggaccgctcggacctggagccgtccccactgcgccaggccaagcccattgccgacctccacgctgctcagcggttcctgtccagatacggctggtcaggggtgtgggcggcctgggggcccagtcccgaggggccgccggagacccccaagggcgccgccctggccgaggcggtgcgcaggttccagcgggcgaacgcgctgccggccagcggggagctggacgcggccaccctagcggccatgaaccggccgcgctgcggggtcccggacatgcgcccaccgcccccctccgccccgccttcgcccccgggcccgccccccagagcccgctccaggcgctccccgcgggcgccgctgtccttgtcccggcggggttggcagccccggggctaccccgacggcggagctgcccaggccttctccaagaggacgctgagctggcggctgctgggcgaggccctgagcagccaactgtccgtggccgaccagcggcgcattgtggcgctggccttcaggatgtggagcgaggtgacgccgctggacttccgcgaggacctggccgcccccggggccgcggtcgacatcaagctgggctttgggagaggccggcacctgggctgtccgcgggccttcgatgggagcgggcaggagtttgcacacgcctggcgcctaggtgacattcactttgacgacgacgagcacttcacacctcccaccagtgacacgggcatcagccttctcaaggtggccgtccatgaaattggccatgtcctgggcttgcctcacacctacaggacgggatccataatgcaaccaaattacattccccaggagcctgcctttgagttggactggtcagacaggaaagcaattcaaaagctgtatggctcctgtgagggatcatttgatactgcgtttgactggattcgcaaagagagaaaccaatatggagaggtgatggtgagatttagcacatatttcttccgtaacagctggtactggctttatgaaaatcgaaacaataggacacgctatggggaccctatccaaatcctcactggctggcctggaatcccaacacacaacatagatgcctttgttcacatctggacatggaaaagagatgaacgttatttttttcaaggaaatcaatactggagatatgacagtgacaaggatcaggccctcacagaagatgaacaaggaaaaagctatcccaaattgatttcagaaggatttcctggcatcccaagtcccctagacacggcgttttatgaccgaagacagaagttaatttacttcttcaaggagtcccttgtatttgcatttgatgtcaacagaaatcgagtacttaattcttatccaaagaggattactgaagtttttccagcagtaataccacaaaatcatcctttcagaaatatagattccgcttattactcctatgcatacaactccattttctttttcaaaggcaatgcatactggaaggtagttaatgacaaggacaaacaacagaattcctggcttcctgctaatggcttatttccaaaaaagtttatttcagagaagtggtttgatgtttgtgacgtccatatctccacactgaacatgtaataagaaaaagtaggaaatggagggtcataggacttcgctaaaattctgatactgtttacaaagaaaaccggattttcagtagctgaagaaaatatggcactgtaagttaaaacccaatgggaaaagccttagttgaacttttaaaatacttgatttaaaaacaattgctcaggcaaaacataattcataaactaaaaggtttaaaaaaa

SEQ ID NO: 316 - protein, 569 aa, Homo sapiens [sequence omitted]

SEQ ID NO: 317 - protein, 425 aa, Homo sapiens
  MMP-21 mature
SPRAPLSLSRRGWQPRGYPDGGAAQAFSKRTLSWRLLGEALSSQLSAADQRRIVALAFRMWSEVTPLDFREDLAAPGAAVDIKLGFGRGRHLGCPRAFDGSGQEFAHAWRLGDIHFDDDEHFTPPTSDTGISLLKVAVHEIGHVLGLPHTYRTGSIMQPNYIPQEPAFELDWSDRKAIQKLYGSCEGSFDTAFDWIRKERNQYGEVMVRFSTYFFRNSWYWLYENRNNRTRYGDPIQILTGWPGIPTHNIDAFVHIWTWKRDERYFFQGNQYWRYDSDKDQALTEDEQGKSYPKLISEGFPGIPSPLDTAFYDRRQKLIYFFKESLVFAFDVNRNRVLNSYPKRITEVFPAVIPQNHPFRNIDSAYYSYAYNSIFFFKGNAYWKVVNDKDKQQNSWLPANGLFPKKFISEKWFDVCDVHISTLNM

SEQ ID NO: 318 - DNA, 1246 bp, Homo sapiens
  MMP-23
ctgccccatgcagccctgagccccacagcaagtctgccatgggccgcggggcccgtgtcccctcggaggccccgggggcaggcgtcgagcgccgctggcttggagccgcgctggtcgccctgtgcctcctccccgcgctggtgctgctggcccggctgggggccccggcggtgccggcctggagcgcagcgcagggagacgtcgctgcgctgggcctctcggcggtcccccccacccgggtcccgggcccactggccccccgcagacgccgctacacgctgactccagccaggctgcgctgggaccacttcaacctcacctacaggatcctctccttcccgcggaacctgctgagcccgcgggagacgcggcgggccctagctgccgccttccgcatgtggagcgacgtgtcccccttcagcttccgcgaggtggcccccgagcagcccagcgacctccggataggcttctacccgatcaaccacacggactgcctggtctccgcgctgcaccactgcttcgacggccccacgggggagctggcccacgccttcttccccccgcacggcggcatccacttcgacgacagcgagtactgggtcctgggccccacgcgctacagctggaagaaaggcgtgtggctcacggacctggtgcacgtggcggcccacgagatcggccacgcgctgggcctgatgcactcacaacacggccgggcgctcatgcacctgaacgccacgctgcgcggctggaaggcgttgtcccaggacgagctgtgggggctgcaccggctctacggatgcctcgacaggctgttcgtgtgcgcgtcctgggcgcggaggggcttctgcgacgctcgccggcggctcatgaagaggctctgccccagcagctgcgacttctgctacgaattccccttccccacggtggccaccaccccaccgccccccaggaccaaaaccaggctggtgcccgagggcaggaacgtgaccttccgctgcggccagaagatcctccacaagaaagggaaagtgtactggtacaaggaccaggagcccctggagttctcctaccccggctacctggccctgggcgaggcgcacctgagcatcatcgccaacgccgtcaatgagggcacctacacctgcgtggtgcgccgccagcagcgcgtgctgaccacctactcctggcgagtccgtgtgcggggctgagcccggctgataaagcactttctctctgaaaaaaa

SEQ ID NO: 319 - protein, 390 aa, Homo sapiens
  MMP-23 precursor
MGRGARVPSEAPGAGVERRWLGAALVALCLLPALVLLARLGAPAVPAWSAAQGDVAALGLSAVPPTRVPGPLAPRRRRYTLTPARLRWDHFNLTYRILSFPRNLLSPRETRRALAAAFRMWSDVSPFSFREVAPEQPSDLRIGFYPINHTDCLVSALHHCFDGPTGELAHAFFPPHGGIHFDDSEYWVLGPTRYSWKKGVWLTDLVHVAAHEIGHALGLMHSQHGRALMHLNATLRGWKALSQDELWGLHRLYGCLDRLFVCASWARRGFCDARRRLMKRLCPSSCDFCYEFPFPTVATTPPPPRTKTRLVPEGRNVTFRCGQKILHKKGKVYWYKDQEPLEFSYPGYLALGEAHLSIIANAVNEGTYTCVVRRQQRVLTTYSWRVRVRG

SEQ ID NO: 320 - protein, 312 aa, Homo sapiens
  MMP-23 mature
YTLTPARLRWDHFNLTYRILSFPRNLLSPRETRRALAAAFRMWSDVSPFSFREVAPEQPSDLRIGFYPINHTDCLVSALHHCFDGPTGELAHAFFPPHGGIHFDDSEYWVLGPTRYSWKKGVWLTDLVHVAAHEIGHALGLMHSQHGRALMHLNATLRGWKALSQDELWGLHRLYGCLDRLFVCASWARRGFCDARRRLMKRLCPSSCDFCYEFPFPTVATTPPPPRTKTRLVPEGRNVTFRCGQKILHKKGKVYWYKDQEPLEFSYPGYLALGEAHLSIIANAVNEGTYTCVVRRQQRVLTTYSWRVRVRG

SEQ ID NO: 321 - DNA, 1647 bp, Homo sapiens
  MMP-27
gcttcagctgaagaaagagaggaatgaagcgccttctgcttctgtttttgttctttataacattttcttctgcatttcccttagtccggatgacggaaaatgaagaaaatatgcaactggctcaggcatatctcaaccagttctactctcttgaaatagaagggaatcatcttgttcaaagcaagaataggagtctcatagatgacaaaattcgggaaatgcaagcattttttggattgacagtgactggaaaactggactcaaacacccttgagatcatgaagacacccaggtgtggggtgcctgatgtgggccagtatggctacaccctccctgggtggagaaaatacaacctcacctacagaataataaactatactccggatatggcacgagctgctgtggatgaggctatccaagaaggtttagaagtgtggagcaaagtcactccactaaaattcaccaagatttcaaaggggattgcagacatcatgattgcctttaggactcgagtccatggtcggtgtcctcgctattttgatggtcccttgggagtgcttggccatgcctttcctcctggtccgggtctgggtggtgacactcattttgatgaggatgaaaactggaccaaggatggagcaggattcaacttgtttcttgtggctgctcatgaatttggtcatgcactggggctctctcactccaatgatcaaacagccttgatgttcccaaattatgtctccctggatcccagaaaatacccactttctcaggatgatatcaatggaatccagtccatctatggaggtctgcctaaggaacctgctaagccaaaggaacccactataccccatgcctgtgaccctgacttgacttttgacgctatcacaactttccgcagagaagtaatgttctttaaaggcaggcacctatggaggatctattatgatatcacggatgttgagtttgaattaattgcttcattctggccatctctgccagctgatctgcaagctgcatacgagaaccccagagataagattctggtttttaaagatgaaaacttctggatgatcagaggatatgctgtcttgccagattatcccaaatccatccatacattaggttttccaggacgtgtgaagaaaatagatgcagccgtctgtgataagaccacaagaaaaacctacttctttgtgggcatttggtgctggaggtttgatgaaatgacccaaaccatggacaaagggttcccgcagagagtggtaaaacactttcctggaatcagtatccgtgttgatgctgctttccagtacaaaggattcttctttttcagccgtggatcaaagcaatttgaatacgacattaagacaaagaatattacccgaatcatgagaactaatacttggtttcaatgcaaagaaccaaagaactcctcatttggttttgatatcaacaaggaaaaagcacattcaggaggcataaagatattgtatcataagagtttaagcttgtttatttttggtattgttcatttgctgaaaaacacttctatttatcaataaattcatagacctaaaataaacctcaacaggtcttttaatataaattctgcttcaaaatagaataaaaccattctttaacaac

SEQ ID NO: 322 - protein, 513 aa, Homo sapiens
  MMP-27 precursor
MKRLLLLFLFFITFSSAFPLVRMMENEENVQLAQAYLNQFYSLEIEGNHLVQSKNRSLIDDKIREMQAFFGLTVTGKLDSNTLEIMKTPRCGVPDVGQYGYTLPGWRKYNLTYRIINYTPDMARAAVDEAIQEGLEVWSKVTPLKFTKISKGIADIMIAFRTRVHGRCPRYFDGPLGVLGHAFPPGPGLGGDTHFDEDENWTKDGAGFNLFLVAAHEFGHALGLSHSNDQTALMFPNYVSLDPRKYPLSQDDINGIQSIYGGLPKEPAKPKEPTIPHACDPDLTFDAITTFRREVMFFKGRHLWRIYYDITDVEFELIASFWPSLPADLQAAYENPRDKILVFKDENFWMIRGYAVLPDYPKSIHTLGFPGRVKKIDAAVCDKTTRKTYFFVGIWCWRFDEMTQTMDKGFPQRVVKHFPGISIRVDAAFQYKGFFFFSRGSKQFEYDIKTKNITRIMRTNTWFQCKEPKNSSFGFDINKEKAHSGGIKILYHKSLSLFIFGIVHLLKNTSIYQ

SEQ ID NO: 323 - protein, 415 aa, Homo sapiens
  MMP-27 mature
YGYTLPGWRKYNLTYRIINYTPDMARAAVDEAIQEGLEVWSKVTPLKFTKISKGIADIMIAFRTRVHGRCPRYFDGPLGVLGHAFPPGPGLGGDTHFDEDENWTKDGAGFNLFLVAAHEFGHALGLSHSNDQTALMFPNYVSLDPRKYPLSQDDINGIQSIYGGLPKEPAKPKEPTIPHACDPDLTFDAITTFRREVMFFKGRHLWRIYYDITDVEFELIASFWPSLPADLQAAYENPRDKILVFKDENFWMIRGYAVLPDYPKSIHTLGFPGRVKKIDAAVCDKTTRKTYFFVGIWCWRFDEMTQTMDKGFPQRVVKHFPGISIRVDAAFQYKGFFFFSRGSKQFEYDIKTKNITRIMRTNTWFQCKEPKNSSFGFDINKEKAHSGGIKILYHKSLSLFIFGIVHLLKNTSIYQ

SEQ ID NO: 324 - DNA, 2480 bp, Homo sapiens
  MMP-28
tccctcggtccccggggccggcggacccgcgggcaggcactgcccgggctggacgacgtctggccggctcccggcgaagggcagcggaggagcggcccagagcgcgcagctagggcactggcgaaaccccgggacagtccctctccgtgcgggggcggcgcagagcagtcccatccccggggtcccgggcgcggctgactgccggctggttccctgcgcgcagtagctccccgagccgggctgcaccggaggcggcgagatggtcgcgcgcgtcggcctcctgctgcgcgccctgcagctgctactgtggggccacctggacgcccagcccgcggagcgcggaggccaggagctgcgcaaggaggcggaggcattcctagagaagtacggatacctcaatgaacaggtccccaaagctcccacctccactcgattcagcgatgccatcagagcgtttcagtgggtgtcccagctacctgtcagcggcgtgttggaccgcgccaccctgcgccagatgactcgtccccgctgcggggttacagataccaacagttatgcggcctgggctgagaggatcagtgacttgtttgctagacaccggaccaaaatgaggcgtaagaaacgctttgcaaagcaaggtaacaaatggtacaagcagcacctctcctaccgcctggtgaactggcctgagcatctgccggagccggcagttcggggcgccgtgcgcgccgccttccagttgtggagcaacgtctcagcgctggagttctgggaggccccagccacaggccccgctgacatccggctcaccttcttccaaggggaccacaacgatgggctgggcaatgcctttgatggcccagggggcgccctggcgcacgccttcctgccccgccgcggcgaagcgcacttcgaccaagatgagcgctggtccctgagccgccgccgcgggcgcaacctgttcgtggtgctggcgcacgagatcggtcacacgcttggcctcacccactcgcccgcgccgcgcgcgctcatggcgccctactacaagaggctgggccgcgacgcgctgctcagctgggacgacgtgctggccgtgcagagcctgtatgggaagcccctagggggctcagtggccgtccagctcccaggaaagctgttcactgactttgagacctgggactcctacagcccccaaggaaggcgccctgaaacgcagggccctaaatactgccactcttccttcgatgccatcactgtagacaggcaacagcaactgtacatttttaaagggagccatttctgggaggtggcagctgatggcaacgtctcagagccccgtccactgcaggaaagatgggtcgggctgccccccaacattgaggctgcggcagtgtcattgaatgatggagatttctacttcttcaaagggggtcgatgctggaggttccggggccccaagccagtgtggggtctcccacagctgtgccgggcagggggcctgccccgccatcctgacgccgccctcttcttccctcctctgcgccgcctcatcctcttcaagggtgcccgctactacgtgctggcccgagggggactgcaagtggagccctactacccccgaagtctgcaggactggggaggcatccctgaggaggtcagcggcgccctgccgaggcccgatggctccatcatcttcttccgagatgaccgctactggcgcctcgaccaggccaaactgcaggcaaccacctcgggccgctgggccaccgagctgccctggatgggctgctggcatgccaactcggggagcgccctgttctgaaggcacctcctcacctcagaaactggtggtgctctcagggcaaaatcatgttccccacccccggggcagaacccctcttagaagcctctgagtccctctgcagaagaccgggcagcaaagcctccatctggaagtctgtctgcctttgttccttgaagaatgcagcattgtctttgtctgtccccaccacatggaggtgggggtgggatcaatcttaggaaaagcaaaaaagggtcccagatcccttggccctttcctccgaggacttctatcctccccaggcctttgtttcttcggctaaaggtacagttcctttcaagaggtaacagcactgggatccaagcagggggatgaaaaactcagcagagaaattcgagaccattttgcaagactgtgcccttctcctcaggaccccctggctcagttcttgaaaaacggtgtcatatttagtcagaggccccacccccaggaagcatggatggggatgaaggcacaggcgtctccaacctcagaggccctttgtggggtcaggacacagagtgggagggagactgatgcaggcctaccagtccctggctttttgtctggggctggaataaagaggtgccttcagctggtgggccgagaggcaggaagcagccttaaaaaaaaaaaaaaa

SEQ ID NO: 325 - protein, 520 aa, Homo sapiens
  MMP-28 precursor
MVARVGLLLRALQLLLWGHLDAQPAERGGQELRKEAEAFLEKYGYLNEQVPKAPTSTRFSDAIRAFQWVSQLPVSGVLDRATLRQMTRPRCGVTDTNSYAAWAERISDLFARHRTKMRRKKRFAKQGNKWYKQHLSYRLVNWPEHLPEPAVRGAVRAAFQLWSNVSALEFWEAPATGPADIRLTFFQGDHNDGLGNAFDGPGGALAHAFLPRRGEAHFDQDERWSLSRRRGRNLFVVLAHEIGHTLGLTHSPAPRALMAPYYKRLGRDALLSWDDVLAVQSLYGKPLGGSVAVQLPGKLFTDFETWDSYSPQGRRPETQGPKYCHSSFDAITVDRQQQLYIFKGSHFWEVAADGNVSEPRPLQERWVGLPPNIEAAAVSLNDGDFYFFKGGRCWRFRGPKPVWGLPQLCRAGGLPRHPDAALFFPPLRRLILFKGARYYVLARGGLQVEPYYPRSLQDWGGIPEEVSGALPRPDGSIIFFRDDRYWRLDQAKLQATTSGRWATELPWMGCWHANSGSALF

SEQ ID NO: 326 - protein, 398 aa, Homo sapiens
  MMP-28 mature
FAKQGNKWYKQHLSYRLVNWPEHLPEPAVRGAVRAAFQLWSNVSALEFWEAPATGPADIRLTFFQGDHNDGLGNAFDGPGGALAHAFLPRRGEAHFDQDERWSLSRRRGRNLFVVLAHEIGHTLGLTHSPAPRALMAPYYKRLGRDALLSWDDVLAVQSLYGKPLGGSVAVQLPGKLFTDFETWDSYSPQGRRPETQGPKYCHSSFDAITVDRQQQLYIFKGSHFWEVAADGNVSEPRPLQERWVGLPPNIEAAAVSLNDGDFYFFKGGRCWRFRGPKPVWGLPQLCRAGGLPRHPDAALFFPPLRRLILFKGARYYVLARGGLQVEPYYPRSLQDWGGIPEEVSGALPRPDGSIIFFRDDRYWRLDQAKLQATTSGRWATELPWMGCWHANSGSALF

SEQ ID NO: 327 - protein, 450 aa, Homo sapiens
  Mature MMP-1 with prodomain
FPATLETQEQDVDLVQKYLEKYYNLKNDGRQVEKRRNSGPVVEKLKQMQEFFGLKVTGKPDAETLKVMKQPRCGVPDVAQFVLTEGNPRWEQTHLTYRIENYTPDLPRADVDHAIEKAFQLWSNVTPLTFTKVSEGQADIMISFVRGDHRDNSPFDGPGGNLAHAFQPGPGIGGDAHFDEDERWTNNFREYNLHRVAAHELGHSLGLSHSTDIGALMYPSYTFSGDVQLAQDDIDGIQAIYGRSQNPVQPIGPQTPKACDSKLTFDAITTIRGEVMFFKDRFYMRTNPFYPEVELNFISVFWPQLPNGLEAAYEFADRDEVRFFKGNKYWAVQGQNVLHGYPKDIYSSFGFPRTVKHIDAALSEENTGKTYFFVANKYWRYDEYKRSMDPGYPKMIAHDFPGIGHKVDAVFMKDGFFYFFHGTRQYKFDPKTKRILTLQKANSWFNCRKN

SEQ ID NO: 328 - protein, 450 aa, Artificial Sequence
  MMP-1 variant L95K
FPATLETQEQDVDLVQKYLEKYYNLKNDGRQVEKRRNSGPVVEKLKQMQEFFGLKVTGKPDAETLKVMKQPRCGVPDVAQFVLTEGNPRWEQTHKTYRIENYTPDLPRADVDHAIEKAFQLWSNVTPLTFTKVSEGQADIMISFVRGDHRDNSPFDGPGGNLAHAFQPGPGIGGDAHFDEDERWTNNFREYNLHRVAAHELGHSLGLSHSTDIGALMYPSYTFSGDVQLAQDDIDGIQAIYGRSQNPVQPIGPQTPKACDSKLTFDAITTIRGEVMFFKDRFYMRTNPFYPEVELNFISVFWPQLPNGLEAAYEFADRDEVRFFKGNKYWAVQGQNVLHGYPKDIYSSFGFPRTVKHIDAALSEENTGKTYFFVANKYWRYDEYKRSMDPGYPKMIAHDFPGIGHKVDAVFMKDGFFYFFHGTRQYKFDPKTKRILTLQKANSWFNCRKN

SEQ ID NO: 329 - protein, 450 aa, Artificial Sequence
  MMP-1 variant L95I
FPATLETQEQDVDLVQKYLEKYYNLKNDGRQVEKRRNSGPVVEKLKQMQEFFGLKVTGKPDAETLKVMKQPRCGVPDVAQFVLTEGNPRWEQTHITYRIENYTPDLPRADVDHAIEKAFQLWSNVTPLTFTKVSEGQADIMISFVRGDHRDNSPFDGPGGNLAHAFQPGPGIGGDAHFDEDERWTNNFREYNLHRVAAHELGHSLGLSHSTDIGALMYPSYTFSGDVQLAQDDIDGIQAIYGRSQNPVQPIGPQTPKACDSKLTFDAITTIRGEVMFFKDRFYMRTNPFYPEVELNFISVFWPQLPNGLEAAYEFADRDEVRFFKGNKYWAVQGQNVLHGYPKDIYSSFGFPRTVKHIDAALSEENTGKTYFFVANKYWRYDEYKRSMDPGYPKMIAHDFPGIGHKVDAVFMKDGFFYFFHGTRQYKFDPKTKRILTLQKANSWFNCRKN

SEQ ID NO: 330 - protein, 450 aa, Artificial Sequence
  MMP-1 variant D105E
FPATLETQEQDVDLVQKYLEKYYNLKNDGRQVEKRRNSGPVVEKLKQMQEFFGLKVTGKPDAETLKVMKQPRCGVPDVAQFVLTEGNPRWEQTHLTYRIENYTPELPRADVDHAIEKAFQLWSNVTPLTFTKVSEGQADIMISFVRGDHRDNSPFDGPGGNLAHAFQPGPGIGGDAHFDEDERWTNNFREYNLHRVAAHELGHSLGLSHSTDIGALMYPSYTFSGDVQLAQDDIDGIQAIYGRSQNPVQPIGPQTPKACDSKLTFDAITTIRGEVMFFKDRFYMRTNPFYPEVELNFISVFWPQLPNGLEAAYEFADRDEVRFFKGNKYWAVQGQNVLHGYPKDIYSSFGFPRTVKHIDAALSEENTGKTYFFVANKYWRYDEYKRSMDPGYPKMIAHDFPGIGHKVDAVFMKDGFFYFFHGTRQYKFDPKTKRILTLQKANSWFNCRKN

SEQ ID NO: 331 - protein, 450 aa, Artificial Sequence
  MMP-1 variant D105R
FPATLETQEQDVDLVQKYLEKYYNLKNDGRQVEKRRNSGPVVEKLKQMQEFFGLKVTGKPDAETLKVMKQPRCGVPDVAQFVLTEGNPRWEQTHLTYRIENYTPRLPRADVDHAIEKAFQLWSNVTPLTFTKVSEGQADIMISFVRGDHRDNSPFDGPGGNLAHAFQPGPGIGGDAHFDEDERWTNNFREYNLHRVAAHELGHSLGLSHSTDIGALMYPSYTFSGDVQLAQDDIDGIQAIYGRSQNPVQPIGPQTPKACDSKLTFDAITTIRGEVMFFKDRFYMRTNPFYPEVELNFISVFWPQLPNGLEAAYEFADRDEVRFFKGNKYWAVQGQNVLHGYPKDIYSSFGFPRTVKHIDAALSEENTGKTYFFVANKYWRYDEYKRSMDPGYPKMIAHDFPGIGHKVDAVFMKDGFFYFFHGTRQYKFDPKTKRILTLQKANSWFNCRKN

SEQ ID NO: 332 - protein, 450 aa, Artificial Sequence
  MMP-1 variant D105N
FPATLETQEQDVDLVQKYLEKYYNLKNDGRQVEKRRNSGPVVEKLKQMQEFFGLKVTGKPDAETLKVMKQPRCGVPDVAQFVLTEGNPRWEQTHLTYRIENYTPNLPRADVDHAIEKAFQLWSNVTPLTFTKVSEGQADIMISFVRGDHRDNSPFDGPGGNLAHAFQPGPGIGGDAHFDEDERWTNNFREYNLHRVAAHELGHSLGLSHSTDIGALMYPSYTFSGDVQLAQDDIDGIQAIYGRSQNPVQPIGPQTPKACDSKLTFDAITTIRGEVMFFKDRFYMRTNPFYPEVELNFISVFWPQLPNGLEAAYEFADRDEVRFFKGNKYWAVQGQNVLHGYPKDIYSSFGFPRTVKHIDAALSEENTGKTYFFVANKYWRYDEYKRSMDPGYPKMIAHDFPGIGHKVDAVFMKDGFFYFFHGTRQYKFDPKTKRILTLQKANSWFNCRKN

SEQ ID NO: 333 - protein, 450 aa, Artificial Sequence
  MMP-1 variant D105T
FPATLETQEQDVDLVQKYLEKYYNLKNDGRQVEKRRNSGPVVEKLKQMQEFFGLKVTGKPDAETLKVMKQPRCGVPDVAQFVLTEGNPRWEQTHLTYRIENYTPTLPRADVDHAIEKAFQLWSNVTPLTFTKVSEGQADIMISFVRGDHRDNSPFDGPGGNLAHAFQPGPGIGGDAHFDEDERWTNNFREYNLHRVAAHELGHSLGLSHSTDIGALMYPSYTFSGDVQLAQDDIDGIQAIYGRSQNPVQPIGPQTPKACDSKLTFDAITTIRGEVMFFKDRFYMRTNPFYPEVELNFISVFWPQLPNGLEAAYEFADRDEVRFFKGNKYWAVQGQNVLHGYPKDIYSSFGFPRTVKHIDAALSEENTGKTYFFVANKYWRYDEYKRSMDPGYPKMIAHDFPGIGHKVDAVFMKDGFFYFFHGTRQYKFDPKTKRILTLQKANSWFNCRKN

SEQ ID NO: 334 - protein, 450 aa, Artificial Sequence
  MMP-1 variant D105S
FPATLETQEQDVDLVQKYLEKYYNLKNDGRQVEKRRNSGPVVEKLKQMQEFFGLKVTGKPDAETLKVMKQPRCGVPDVAQFVLTEGNPRWEQTHLTYRIENYTPSLPRADVDHAIEKAFQLWSNVTPLTFTKVSEGQADIMISFVRGDHRDNSPFDGPGGNLAHAFQPGPGIGGDAHFDEDERWTNNFREYNLHRVAAHELGHSLGLSHSTDIGALMYPSYTFSGDVQLAQDDIDGIQAIYGRSQNPVQPIGPQTPKACDSKLTFDAITTIRGEVMFFKDRFYMRTNPFYPEVELNFISVFWPQLPNGLEAAYEFADRDEVRFFKGNKYWAVQGQNVLHGYPKDIYSSFGFPRTVKHIDAALSEENTGKTYFFVANKYWRYDEYKRSMDPGYPKMIAHDFPGIGHKVDAVFMKDGFFYFFHGTRQYKFDPKTKRILTLQKANSWFNCRKN

SEQ ID NO: 335 - protein, 450 aa, Artificial Sequence
  MMP-1 variant D105G
FPATLETQEQDVDLVQKYLEKYYNLKNDGRQVEKRRNSGPVVEKLKQMQEFFGLKVTGKPDAETLKVMKQPRCGVPDVAQFVLTEGNPRWEQTHLTYRIENYTPGLPRADVDHAIEKAFQLWSNVTPLTFTKVSEGQADIMISFVRGDHRDNSPFDGPGGNLAHAFQPGPGIGGDAHFDEDERWTNNFREYNLHRVAAHELGHSLGLSHSTDIGALMYPSYTFSGDVQLAQDDIDGIQAIYGRSQNPVQPIGPQTPKACDSKLTFDAITTIRGEVMFFKDRFYMRTNPFYPEVELNFISVFWPQLPNGLEAAYEFADRDEVRFFKGNKYWAVQGQNVLHGYPKDIYSSFGFPRTVKHIDAALSEENTGKTYFFVANKYWRYDEYKRSMDPGYPKMIAHDFPGIGHKVDAVFMKDGFFYFFHGTRQYKFDPKTKRILTLQKANSWFNCRKN

SEQ ID NO: 336 - protein, 450 aa, Artificial Sequence
  MMP-1 variant D105F
FPATLETQEQDVDLVQKYLEKYYNLKNDGRQVEKRRNSGPVVEKLKQMQEFFGLKVTGKPDAETLKVMKQPRCGVPDVAQFVLTEGNPRWEQTHLTYRIENYTPFLPRADVDHAIEKAFQLWSNVTPLTFTKVSEGQADIMISFVRGDHRDNSPFDGPGGNLAHAFQPGPGIGGDAHFDEDERWTNNFREYNLHRVAAHELGHSLGLSHSTDIGALMYPSYTFSGDVQLAQDDIDGIQAIYGRSQNPVQPIGPQTPKACDSKLTFDAITTIRGEVMFFKDRFYMRTNPFYPEVELNFISVFWPQLPNGLEAAYEFADRDEVRFFKGNKYWAVQGQNVLHGYPKDIYSSFGFPRTVKHIDAALSEENTGKTYFFVANKYWRYDEYKRSMDPGYPKMIAHDFPGIGHKVDAVFMKDGFFYFFHGTRQYKFDPKTKRILTLQKANSWFNCRKN

SEQ ID NO: 337 - protein, 450 aa, Artificial Sequence
  MMP-1 variant D105W
FPATLETQEQDVDLVQKYLEKYYNLKNDGRQVEKRRNSGPVVEKLKQMQEFFGLKVTGKPDAETLKVMKQPRCGVPDVAQFVLTEGNPRWEQTHLTYRIENYTPWLPRADVDHAIEKAFQLWSNVTPLTFTKVSEGQADIMISFVRGDHRDNSPFDGPGGNLAHAFQPGPGIGGDAHFDEDERWTNNFREYNLHRVAAHELGHSLGLSHSTDIGALMYPSYTFSGDVQLAQDDIDGIQAIYGRSQNPVQPIGPQTPKACDSKLTFDAITTIRGEVMFFKDRFYMRTNPFYPEVELNFISVFWPQLPNGLEAAYEFADRDEVRFFKGNKYWAVQGQNVLHGYPKDIYSSFGFPRTVKHIDAALSEENTGKTYFFVANKYWRYDEYKRSMDPGYPKMIAHDFPGIGHKVDAVFMKDGFFYFFHGTRQYKFDPKTKRILTLQKANSWFNCRKN

SEQ ID NO: 338 - protein, 450 aa, Artificial Sequence
  MMP-1 variant D105I
FPATLETQEQDVDLVQKYLEKYYNLKNDGRQVEKRRNSGPVVEKLKQMQEFFGLKVTGKPDAETLKVMKQPRCGVPDVAQFVLTEGNPRWEQTHLTYRIENYTPILPRADVDHAIEKAFQLWSNVTPLTFTKVSEGQADIMISFVRGDHRDNSPFDGPGGNLAHAFQPGPGIGGDAHFDEDERWTNNFREYNLHRVAAHELGHSLGLSHSTDIGALMYPSYTFSGDVQLAQDDIDGIQAIYGRSQNPVQPIGPQTPKACDSKLTFDAITTIRGEVMFFKDRFYMRTNPFYPEVELNFISVFWPQLPNGLEAAYEFADRDEVRFFKGNKYWAVQGQNVLHGYPKDIYSSFGFPRTVKHIDAALSEENTGKTYFFVANKYWRYDEYKRSMDPGYPKMIAHDFPGIGHKVDAVFMKDGFFYFFHGTRQYKFDPKTKRILTLQKANSWFNCRKN

SEQ ID NO: 339 - protein, 450 aa, Artificial Sequence
  MMP-1 variant D105L
FPATLETQEQDVDLVQKYLEKYYNLKNDGRQVEKRRNSGPVVEKLKQMQEFFGLKVTGKPDAETLKVMKQPRCGVPDVAQFVLTEGNPRWEQTHLTYRIENYTPLLPRADVDHAIEKAFQLWSNVTPLTFTKVSEGQADIMISFVRGDHRDNSPFDGPGGNLAHAFQPGPGIGGDAHFDEDERWTNNFREYNLHRVAAHELGHSLGLSHSTDIGALMYPSYTFSGDVQLAQDDIDGIQAIYGRSQNPVQPIGPQTPKACDSKLTFDAITTIRGEVMFFKDRFYMRTNPFYPEVELNFISVFWPQLPNGLEAAYEFADRDEVRFFKGNKYWAVQGQNVLHGYPKDIYSSFGFPRTVKHIDAALSEENTGKTYFFVANKYWRYDEYKRSMDPGYPKMIAHDFPGIGHKVDAVFMKDGFFYFFHGTRQYKFDPKTKRILTLQKANSWFNCRKN

SEQ ID NO: 340 - protein, 450 aa, Artificial Sequence
  MMP-1 variant D105A
FPATLETQEQDVDLVQKYLEKYYNLKNDGRQVEKRRNSGPVVEKLKQMQEFFGLKVTGKPDAETLKVMKQPRCGVPDVAQFVLTEGNPRWEQTHLTYRIENYTPALPRADVDHAIEKAFQLWSNVTPLTFTKVSEGQADIMISFVRGDHRDNSPFDGPGGNLAHAFQPGPGIGGDAHFDEDERWTNNFREYNLHRVAAHELGHSLGLSHSTDIGALMYPSYTFSGDVQLAQDDIDGIQAIYGRSQNPVQPIGPQTPKACDSKLTFDAITTIRGEVMFFKDRFYMRTNPFYPEVELNFISVFWPQLPNGLEAAYEFADRDEVRFFKGNKYWAVQGQNVLHGYPKDIYSSFGFPRTVKHIDAALSEENTGKTYFFVANKYWRYDEYKRSMDPGYPKMIAHDFPGIGHKVDAVFMKDGFFYFFHGTRQYKFDPKTKRILTLQKANSWFNCRKN

SEQ ID NO: 341 - protein, 450 aa, Artificial Sequence
  MMP-1 variant R150D
FPATLETQEQDVDLVQKYLEKYYNLKNDGRQVEKRRNSGPVVEKLKQMQEFFGLKVTGKPDAETLKVMKQPRCGVPDVAQFVLTEGNPRWEQTHLTYRIENYTPDLPRADVDHAIEKAFQLWSNVTPLTFTKVSEGQADIMISFVRGDHDDNSPFDGPGGNLAHAFQPGPGIGGDAHFDEDERWTNNFREYNLHRVAAHELGHSLGLSHSTDIGALMYPSYTFSGDVQLAQDDIDGIQAIYGRSQNPVQPIGPQTPKACDSKLTFDAITTIRGEVMFFKDRFYMRTNPFYPEVELNFISVFWPQLPNGLEAAYEFADRDEVRFFKGNKYWAVQGQNVLHGYPKDIYSSFGFPRTVKHIDAALSEENTGKTYFFVANKYWRYDEYKRSMDPGYPKMIAHDFPGIGHKVDAVFMKDGFFYFFHGTRQYKFDPKTKRILTLQKANSWFNCRKN

SEQ ID NO: 342 - protein, 450 aa, Artificial Sequence
  MMP-1 variant R150H
FPATLETQEQDVDLVQKYLEKYYNLKNDGRQVEKRRNSGPVVEKLKQMQEFFGLKVTGKPDAETLKVMKQPRCGVPDVAQFVLTEGNPRWEQTHLTYRIENYTPDLPRADVDHAIEKAFQLWSNVTPLTFTKVSEGQADIMISFVRGDHHDNSPFDGPGGNLAHAFQPGPGIGGDAHFDEDERWTNNFREYNLHRVAAHELGHSLGLSHSTDIGALMYPSYTFSGDVQLAQDDIDGIQAIYGRSQNPVQPIGPQTPKACDSKLTFDAITTIRGEVMFFKDRFYMRTNPFYPEVELNFISVFWPQLPNGLEAAYEFADRDEVRFFKGNKYWAVQGQNVLHGYPKDIYSSFGFPRTVKHIDAALSEENTGKTYFFVANKYWRYDEYKRSMDPGYPKMIAHDFPGIGHKVDAVFMKDGFFYFFHGTRQYKFDPKTKRILTLQKANSWFNCRKN

SEQ ID NO: 343 - protein, 450 aa, Artificial Sequence
  MMP-1 variant R150I
FPATLETQEQDVDLVQKYLEKYYNLKNDGRQVEKRRNSGPVVEKLKQMQEFFGLKVTGKPDAETLKVMKQPRCGVPDVAQFVLTEGNPRWEQTHLTYRIENYTPDLPRADVDHAIEKAFQLWSNVTPLTFTKVSEGQADIMISFVRGDHIDNSPFDGPGGNLAHAFQPGPGIGGDAHFDEDERWTNNFREYNLHRVAAHELGHSLGLSHSTDIGALMYPSYTFSGDVQLAQDDIDGIQAIYGRSQNPVQPIGPQTPKACDSKLTFDAITTIRGEVMFFKDRFYMRTNPFYPEVELNFISVFWPQLPNGLEAAYEFADRDEVRFFKGNKYWAVQGQNVLHGYPKDIYSSFGFPRTVKHIDAALSEENTGKTYFFVANKYWRYDEYKRSMDPGYPKMIAHDFPGIGHKVDAVFMKDGFFYFFHGTRQYKFDPKTKRILTLQKANSWFNCRKN

SEQ ID NO: 344 - protein, 450 aa, Artificial Sequence
  MMP-1 variant R150V
FPATLETQEQDVDLVQKYLEKYYNLKNDGRQVEKRRNSGPVVEKLKQMQEFFGLKVTGKPDAETLKVMKQPRCGVPDVAQFVLTEGNPRWEQTHLTYRIENYTPDLPRADVDHAIEKAFQLWSNVTPLTFTKVSEGQADIMISFVRGDHVDNSPFDGPGGNLAHAFQPGPGIGGDAHFDEDERWTNNFREYNLHRVAAHELGHSLGLSHSTDIGALMYPSYTFSGDVQLAQDDIDGIQAIYGRSQNPVQPIGPQTPKACDSKLTFDAITTIRGEVMFFKDRFYMRTNPFYPEVELNFISVFWPQLPNGLEAAYEFADRDEVRFFKGNKYWAVQGQNVLHGYPKDIYSSFGFPRTVKHIDAALSEENTGKTYFFVANKYWRYDEYKRSMDPGYPKMIAHDFPGIGHKVDAVFMKDGFFYFFHGTRQYKFDPKTKRILTLQKANSWFNCRKN

SEQ ID NO: 345 - protein, 450 aa, Artificial Sequence
  MMP-1 variant R150P
FPATLETQEQDVDLVQKYLEKYYNLKNDGRQVEKRRNSGPVVEKLKQMQEFFGLKVTGKPDAETLKVMKQPRCGVPDVAQFVLTEGNPRWEQTHLTYRIENYTPDLPRADVDHAIEKAFQLWSNVTPLTFTKVSEGQADIMISFVRGDHPDNSPFDGPGGNLAHAFQPGPGIGGDAHFDEDERWTNNFREYNLHRVAAHELGHSLGLSHSTDIGALMYPSYTFSGDVQLAQDDIDGIQAIYGRSQNPVQPIGPQTPKACDSKLTFDAITTIRGEVMFFKDRFYMRTNPFYPEVELNFISVFWPQLPNGLEAAYEFADRDEVRFFKGNKYWAVQGQNVLHGYPKDIYSSFGFPRTVKHIDAALSEENTGKTYFFVANKYWRYDEYKRSMDPGYPKMIAHDFPGIGHKVDAVFMKDGFFYFFHGTRQYKFDPKTKRILTLQKANSWFNCRKN

SEQ ID NO: 346 - protein, 450 aa, Artificial Sequence
  MMP-1 variant D151G
FPATLETQEQDVDLVQKYLEKYYNLKNDGRQVEKRRNSGPVVEKLKQMQEFFGLKVTGKPDAETLKVMKQPRCGVPDVAQFVLTEGNPRWEQTHLTYRIENYTPDLPRADVDHAIEKAFQLWSNVTPLTFTKVSEGQADIMISFVRGDHRGNSPFDGPGGNLAHAFQPGPGIGGDAHFDEDERWTNNFREYNLHRVAAHELGHSLGLSHSTDIGALMYPSYTFSGDVQLAQDDIDGIQAIYGRSQNPVQPIGPQTPKACDSKLTFDAITTIRGEVMFFKDRFYMRTNPFYPEVELNFISVFWPQLPNGLEAAYEFADRDEVRFFKGNKYWAVQGQNVLHGYPKDIYSSFGFPRTVKHIDAALSEENTGKTYFFVANKYWRYDEYKRSMDPGYPKMIAHDFPGIGHKVDAVFMKDGFFYFFHGTRQYKFDPKTKRILTLQKANSWFNCRKN

SEQ ID NO: 347 - protein, 450 aa, Artificial Sequence
  MMP-1 variant F155L
FPATLETQEQDVDLVQKYLEKYYNLKNDGRQVEKRRNSGPVVEKLKQMQEFFGLKVTGKPDAETLKVMKQPRCGVPDVAQFVLTEGNPRWEQTHLTYRIENYTPDLPRADVDHAIEKAFQLWSNVTPLTFTKVSEGQADIMISFVRGDHRDNSPLDGPGGNLAHAFQPGPGIGGDAHFDEDERWTNNFREYNLHRVAAHELGHSLGLSHSTDIGALMYPSYTFSGDVQLAQDDIDGIQAIYGRSQNPVQPIGPQTPKACDSKLTFDAITTIRGEVMFFKDRFYMRTNPFYPEVELNFISVFWPQLPNGLEAAYEFADRDEVRFFKGNKYWAVQGQNVLHGYPKDIYSSFGFPRTVKHIDAALSEENTGKTYFFVANKYWRYDEYKRSMDPGYPKMIAHDFPGIGHKVDAVFMKDGFFYFFHGTRQYKFDPKTKRILTLQKANSWFNCRKN

SEQ ID NO: 348 - protein, 450 aa, Artificial Sequence
  MMP-1 variant F155A
FPATLETQEQDVDLVQKYLEKYYNLKNDGRQVEKRRNSGPVVEKLKQMQEFFGLKVTGKPDAETLKVMKQPRCGVPDVAQFVLTEGNPRWEQTHLTYRIENYTPDLPRADVDHAIEKAFQLWSNVTPLTFTKVSEGQADIMISFVRGDHRDNSPADGPGGNLAHAFQPGPGIGGDAHFDEDERWTNNFREYNLHRVAAHELGHSLGLSHSTDIGALMYPSYTFSGDVQLAQDDIDGIQAIYGRSQNPVQPIGPQTPKACDSKLTFDAITTIRGEVMFFKDRFYMRTNPFYPEVELNFISVFWPQLPNGLEAAYEFADRDEVRFFKGNKYWAVQGQNVLHGYPKDIYSSFGFPRTVKHIDAALSEENTGKTYFFVANKYWRYDEYKRSMDPGYPKMIAHDFPGIGHKVDAVFMKDGFFYFFHGTRQYKFDPKTKRILTLQKANSWFNCRKN

SEQ ID NO: 349 - protein, 450 aa, Artificial Sequence
  MMP-1 variant D156H
FPATLETQEQDVDLVQKYLEKYYNLKNDGRQVEKRRNSGPVVEKLKQMQEFFGLKVTGKPDAETLKVMKQPRCGVPDVAQFVLTEGNPRWEQTHLTYRIENYTPDLPRADVDHAIEKAFQLWSNVTPLTFTKVSEGQADIMISFVRGDHRDNSPFHGPGGNLAHAFQPGPGIGGDAHFDEDERWTNNFREYNLHRVAAHELGHSLGLSHSTDIGALMYPSYTFSGDVQLAQDDIDGIQAIYGRSQNPVQPIGPQTPKACDSKLTFDAITTIRGEVMFFKDRFYMRTNPFYPEVELNFISVFWPQLPNGLEAAYEFADRDEVRFFKGNKYWAVQGQNVLHGYPKDIYSSFGFPRTVKHIDAALSEENTGKTYFFVANKYWRYDEYKRSMDPGYPKMIAHDFPGIGHKVDAVFMKDGFFYFFHGTRQYKFDPKTKRILTLQKANSWFNCRKN

SEQ ID NO: 350 - protein, 450 aa, Artificial Sequence
  MMP-1 variant D156K
FPATLETQEQDVDLVQKYLEKYYNLKNDGRQVEKRRNSGPVVEKLKQMQEFFGLKVTGKPDAETLKVMKQPRCGVPDVAQFVLTEGNPRWEQTHLTYRIENYTPDLPRADVDHAIEKAFQLWSNVTPLTFTKVSEGQADIMISFVRGDHRDNSPFKGPGGNLAHAFQPGPGIGGDAHFDEDERWTNNFREYNLHRVAAHELGHSLGLSHSTDIGALMYPSYTFSGDVQLAQDDIDGIQAIYGRSQNPVQPIGPQTPKACDSKLTFDAITTIRGEVMFFKDRFYMRTNPFYPEVELNFISVFWPQLPNGLEAAYEFADRDEVRFFKGNKYWAVQGQNVLHGYPKDIYSSFGFPRTVKHIDAALSEENTGKTYFFVANKYWRYDEYKRSMDPGYPKMIAHDFPGIGHKVDAVFMKDGFFYFFHGTRQYKFDPKTKRILTLQKANSWFNCRKN

SEQ ID NO: 351 - protein, 450 aa, Artificial Sequence
  MMP-1 variant D156R
FPATLETQEQDVDLVQKYLEKYYNLKNDGRQVEKRRNSGPVVEKLKQMQEFFGLKVTGKPDAETLKVMKQPRCGVPDVAQFVLTEGNPRWEQTHLTYRIENYTPDLPRADVDHAIEKAFQLWSNVTPLTFTKVSEGQADIMISFVRGDHRDNSPFRGPGGNLAHAFQPGPGIGGDAHFDEDERWTNNFREYNLHRVAAHELGHSLGLSHSTDIGALMYPSYTFSGDVQLAQDDIDGIQAIYGRSQNPVQPIGPQTPKACDSKLTFDAITTIRGEVMFFKDRFYMRTNPFYPEVELNFISVFWPQLPNGLEAAYEFADRDEVRFFKGNKYWAVQGQNVLHGYPKDIYSSFGFPRTVKHIDAALSEENTGKTYFFVANKYWRYDEYKRSMDPGYPKMIAHDFPGIGHKVDAVFMKDGFFYFFHGTRQYKFDPKTKRILTLQKANSWFNCRKN

SEQ ID NO: 352 - protein, 450 aa, Artificial Sequence
  MMP-1 variant D156T
FPATLETQEQDVDLVQKYLEKYYNLKNDGRQVEKRRNSGPVVEKLKQMQEFFGLKVTGKPDAETLKVMKQPRCGVPDVAQFVLTEGNPRWEQTHLTYRIENYTPDLPRADVDHAIEKAFQLWSNVTPLTFTKVSEGQADIMISFVRGDHRDNSPFTGPGGNLAHAFQPGPGIGGDAHFDEDERWTNNFREYNLHRVAAHELGHSLGLSHSTDIGALMYPSYTFSGDVQLAQDDIDGIQAIYGRSQNPVQPIGPQTPKACDSKLTFDAITTIRGEVMFFKDRFYMRTNPFYPEVELNFISVFWPQLPNGLEAAYEFADRDEVRFFKGNKYWAVQGQNVLHGYPKDIYSSFGFPRTVKHIDAALSEENTGKTYFFVANKYWRYDEYKRSMDPGYPKMIAHDFPGIGHKVDAVFMKDGFFYFFHGTRQYKFDPKTKRILTLQKANSWFNCRKN

SEQ ID NO: 353 - protein, 450 aa, Artificial Sequence
  MMP-1 variant D156M
FPATLETQEQDVDLVQKYLEKYYNLKNDGRQVEKRRNSGPVVEKLKQMQEFFGLKVTGKPDAETLKVMKQPRCGVPDVAQFVLTEGNPRWEQTHLTYRIENYTPDLPRADVDHAIEKAFQLWSNVTPLTFTKVSEGQADIMISFVRGDHRDNSPFMGPGGNLAHAFQPGPGIGGDAHFDEDERWTNNFREYNLHRVAAHELGHSLGLSHSTDIGALMYPSYTFSGDVQLAQDDIDGIQAIYGRSQNPVQPIGPQTPKACDSKLTFDAITTIRGEVMFFKDRFYMRTNPFYPEVELNFISVFWPQLPNGLEAAYEFADRDEVRFFKGNKYWAVQGQNVLHGYPKDIYSSFGFPRTVKHIDAALSEENTGKTYFFVANKYWRYDEYKRSMDPGYPKMIAHDFPGIGHKVDAVFMKDGFFYFFHGTRQYKFDPKTKRILTLQKANSWFNCRKN

SEQ ID NO: 354 - protein, 450 aa, Artificial Sequence
  MMP-1 variant D156W
FPATLETQEQDVDLVQKYLEKYYNLKNDGRQVEKRRNSGPVVEKLKQMQEFFGLKVTGKPDAETLKVMKQPRCGVPDVAQFVLTEGNPRWEQTHLTYRIENYTPDLPRADVDHAIEKAFQLWSNVTPLTFTKVSEGQADIMISFVRGDHRDNSPFWGPGGNLAHAFQPGPGIGGDAHFDEDERWTNNFREYNLHRVAAHELGHSLGLSHSTDIGALMYPSYTFSGDVQLAQDDIDGIQAIYGRSQNPVQPIGPQTPKACDSKLTFDAITTIRGEVMFFKDRFYMRTNPFYPEVELNFISVFWPQLPNGLEAAYEFADRDEVRFFKGNKYWAVQGQNVLHGYPKDIYSSFGFPRTVKHIDAALSEENTGKTYFFVANKYWRYDEYKRSMDPGYPKMIAHDFPGIGHKVDAVFMKDGFFYFFHGTRQYKFDPKTKRILTLQKANSWFNCRKN

SEQ ID NO: 355 - protein, 450 aa, Artificial Sequence
  MMP-1 variant D156V
FPATLETQEQDVDLVQKYLEKYYNLKNDGRQVEKRRNSGPVVEKLKQMQEFFGLKVTGKPDAETLKVMKQPRCGVPDVAQFVLTEGNPRWEQTHLTYRIENYTPDLPRADVDHAIEKAFQLWSNVTPLTFTKVSEGQADIMISFVRGDHRDNSPFVGPGGNLAHAFQPGPGIGGDAHFDEDERWTNNFREYNLHRVAAHELGHSLGLSHSTDIGALMYPSYTFSGDVQLAQDDIDGIQAIYGRSQNPVQPIGPQTPKACDSKLTFDAITTIRGEVMFFKDRFYMRTNPFYPEVELNFISVFWPQLPNGLEAAYEFADRDEVRFFKGNKYWAVQGQNVLHGYPKDIYSSFGFPRTVKHIDAALSEENTGKTYFFVANKYWRYDEYKRSMDPGYPKMIAHDFPGIGHKVDAVFMKDGFFYFFHGTRQYKFDPKTKRILTLQKANSWFNCRKN

SEQ ID NO: 356 - protein, 450 aa, Artificial Sequence
  MMP-1 variant D156L
FPATLETQEQDVDLVQKYLEKYYNLKNDGRQVEKRRNSGPVVEKLKQMQEFFGLKVTGKPDAETLKVMKQPRCGVPDVAQFVLTEGNPRWEQTHLTYRIENYTPDLPRADVDHAIEKAFQLWSNVTPLTFTKVSEGQADIMISFVRGDHRDNSPFLGPGGNLAHAFQPGPGIGGDAHFDEDERWTNNFREYNLHRVAAHELGHSLGLSHSTDIGALMYPSYTFSGDVQLAQDDIDGIQAIYGRSQNPVQPIGPQTPKACDSKLTFDAITTIRGEVMFFKDRFYMRTNPFYPEVELNFISVFWPQLPNGLEAAYEFADRDEVRFFKGNKYWAVQGQNVLHGYPKDIYSSFGFPRTVKHIDAALSEENTGKTYFFVANKYWRYDEYKRSMDPGYPKMIAHDFPGIGHKVDAVFMKDGFFYFFHGTRQYKFDPKTKRILTLQKANSWFNCRKN

SEQ ID NO: 357 - protein, 450 aa, Artificial Sequence
  MMP-1 variant D156A
FPATLETQEQDVDLVQKYLEKYYNLKNDGRQVEKRRNSGPVVEKLKQMQEFFGLKVTGKPDAETLKVMKQPRCGVPDVAQFVLTEGNPRWEQTHLTYRIENYTPDLPRADVDHAIEKAFQLWSNVTPLTFTKVSEGQADIMISFVRGDHRDNSPFAGPGGNLAHAFQPGPGIGGDAHFDEDERWTNNFREYNLHRVAAHELGHSLGLSHSTDIGALMYPSYTFSGDVQLAQDDIDGIQAIYGRSQNPVQPIGPQTPKACDSKLTFDAITTIRGEVMFFKDRFYMRTNPFYPEVELNFISVFWPQLPNGLEAAYEFADRDEVRFFKGNKYWAVQGQNVLHGYPKDIYSSFGFPRTVKHIDAALSEENTGKTYFFVANKYWRYDEYKRSMDPGYPKMIAHDFPGIGHKVDAVFMKDGFFYFFHGTRQYKFDPKTKRILTLQKANSWFNCRKN

SEQ ID NO: 358 - protein, 450 aa, Artificial Sequence
  MMP-1 variant G159C
FPATLETQEQDVDLVQKYLEKYYNLKNDGRQVEKRRNSGPVVEKLKQMQEFFGLKVTGKPDAETLKVMKQPRCGVPDVAQFVLTEGNPRWEQTHLTYRIENYTPDLPRADVDHAIEKAFQLWSNVTPLTFTKVSEGQADIMISFVRGDHRDNSPFDGPCGNLAHAFQPGPGIGGDAHFDEDERWTNNFREYNLHRVAAHELGHSLGLSHSTDIGALMYPSYTFSGDVQLAQDDIDGIQAIYGRSQNPVQPIGPQTPKACDSKLTFDAITTIRGEVMFFKDRFYMRTNPFYPEVELNFISVFWPQLPNGLEAAYEFADRDEVRFFKGNKYWAVQGQNVLHGYPKDIYSSFGFPRTVKHIDAALSEENTGKTYFFVANKYWRYDEYKRSMDPGYPKMIAHDFPGIGHKVDAVFMKDGFFYFFHGTRQYKFDPKTKRILTLQKANSWFNCRKN

SEQ ID NO: 359 - protein, 450 aa, Artificial Sequence
  MMP-1 variant G159T
FPATLETQEQDVDLVQKYLEKYYNLKNDGRQVEKRRNSGPVVEKLKQMQEFFGLKVTGKPDAETLKVMKQPRCGVPDVAQFVLTEGNPRWEQTHLTYRIENYTPDLPRADVDHAIEKAFQLWSNVTPLTFTKVSEGQADIMISFVRGDHRDNSPFDGPTGNLAHAFQPGPGIGGDAHFDEDERWTNNFREYNLHRVAAHELGHSLGLSHSTDIGALMYPSYTFSGDVQLAQDDIDGIQAIYGRSQNPVQPIGPQTPKACDSKLTFDAITTIRGEVMFFKDRFYMRTNPFYPEVELNFISVFWPQLPNGLEAAYEFADRDEVRFFKGNKYWAVQGQNVLHGYPKDIYSSFGFPRTVKHIDAALSEENTGKTYFFVANKYWRYDEYKRSMDPGYPKMIAHDFPGIGHKVDAVFMKDGFFYFFHGTRQYKFDPKTKRILTLQKANSWFNCRKN

SEQ ID NO: 360 - protein, 450 aa, Artificial Sequence
  MMP-1 variant G159M
FPATLETQEQDVDLVQKYLEKYYNLKNDGRQVEKRRNSGPVVEKLKQMQEFFGLKVTGKPDAETLKVMKQPRCGVPDVAQFVLTEGNPRWEQTHLTYRIENYTPDLPRADVDHAIEKAFQLWSNVTPLTFTKVSEGQADIMISFVRGDHRDNSPFDGPMGNLAHAFQPGPGIGGDAHFDEDERWTNNFREYNLHRVAAHELGHSLGLSHSTDIGALMYPSYTFSGDVQLAQDDIDGIQAIYGRSQNPVQPIGPQTPKACDSKLTFDAITTIRGEVMFFKDRFYMRTNPFYPEVELNFISVFWPQLPNGLEAAYEFADRDEVRFFKGNKYWAVQGQNVLHGYPKDIYSSFGFPRTVKHIDAALSEENTGKTYFFVANKYWRYDEYKRSMDPGYPKMIAHDFPGIGHKVDAVFMKDGFFYFFHGTRQYKFDPKTKRILTLQKANSWFNCRKN

SEQ ID NO: 361 - protein, 450 aa, Artificial Sequence
  MMP-1 variant G159W
FPATLETQEQDVDLVQKYLEKYYNLKNDGRQVEKRRNSGPVVEKLKQMQEFFGLKVTGKPDAETLKVMKQPRCGVPDVAQFVLTEGNPRWEQTHLTYRIENYTPDLPRADVDHAIEKAFQLWSNVTPLTFTKVSEGQADIMISFVRGDHRDNSPFDGPWGNLAHAFQPGPGIGGDAHFDEDERWTNNFREYNLHRVAAHELGHSLGLSHSTDIGALMYPSYTFSGDVQLAQDDIDGIQAIYGRSQNPVQPIGPQTPKACDSKLTFDAITTIRGEVMFFKDRFYMRTNPFYPEVELNFISVFWPQLPNGLEAAYEFADRDEVRFFKGNKYWAVQGQNVLHGYPKDIYSSFGFPRTVKHIDAALSEENTGKTYFFVANKYWRYDEYKRSMDPGYPKMIAHDFPGIGHKVDAVFMKDGFFYFFHGTRQYKFDPKTKRILTLQKANSWFNCRKN

SEQ ID NO: 362 - protein, 450 aa, Artificial Sequence
  MMP-1 variant G159I
FPATLETQEQDVDLVQKYLEKYYNLKNDGRQVEKRRNSGPVVEKLKQMQEFFGLKVTGKPDAETLKVMKQPRCGVPDVAQFVLTEGNPRWEQTHLTYRIENYTPDLPRADVDHAIEKAFQLWSNVTPLTFTKVSEGQADIMISFVRGDHRDNSPFDGPIGNLAHAFQPGPGIGGDAHFDEDERWTNNFREYNLHRVAAHELGHSLGLSHSTDIGALMYPSYTFSGDVQLAQDDIDGIQAIYGRSQNPVQPIGPQTPKACDSKLTFDAITTIRGEVMFFKDRFYMRTNPFYPEVELNFISVFWPQLPNGLEAAYEFADRDEVRFFKGNKYWAVQGQNVLHGYPKDIYSSFGFPRTVKHIDAALSEENTGKTYFFVANKYWRYDEYKRSMDPGYPKMIAHDFPGIGHKVDAVFMKDGFFYFFHGTRQYKFDPKTKRILTLQKANSWFNCRKN

SEQ ID NO: 363 - protein, 450 aa, Artificial Sequence
  MMP-1 variant G159V
FPATLETQEQDVDLVQKYLEKYYNLKNDGRQVEKRRNSGPVVEKLKQMQEFFGLKVTGKPDAETLKVMKQPRCGVPDVAQFVLTEGNPRWEQTHLTYRIENYTPDLPRADVDHAIEKAFQLWSNVTPLTFTKVSEGQADIMISFVRGDHRDNSPFDGPVGNLAHAFQPGPGIGGDAHFDEDERWTNNFREYNLHRVAAHELGHSLGLSHSTDIGALMYPSYTFSGDVQLAQDDIDGIQAIYGRSQNPVQPIGPQTPKACDSKLTFDAITTIRGEVMFFKDRFYMRTNPFYPEVELNFISVFWPQLPNGLEAAYEFADRDEVRFFKGNKYWAVQGQNVLHGYPKDIYSSFGFPRTVKHIDAALSEENTGKTYFFVANKYWRYDEYKRSMDPGYPKMIAHDFPGIGHKVDAVFMKDGFFYFFHGTRQYKFDPKTKRILTLQKANSWFNCRKN

SEQ ID NO: 364 - protein, 450 aa, Artificial Sequence
  MMP-1 variant G159L
FPATLETQEQDVDLVQKYLEKYYNLKNDGRQVEKRRNSGPVVEKLKQMQEFFGLKVTGKPDAETLKVMKQPRCGVPDVAQFVLTEGNPRWEQTHLTYRIENYTPDLPRADVDHAIEKAFQLWSNVTPLTFTKVSEGQADIMISFVRGDHRDNSPFDGPLGNLAHAFQPGPGIGGDAHFDEDERWTNNFREYNLHRVAAHELGHSLGLSHSTDIGALMYPSYTFSGDVQLAQDDIDGIQAIYGRSQNPVQPIGPQTPKACDSKLTFDAITTIRGEVMFFKDRFYMRTNPFYPEVELNFISVFWPQLPNGLEAAYEFADRDEVRFFKGNKYWAVQGQNVLHGYPKDIYSSFGFPRTVKHIDAALSEENTGKTYFFVANKYWRYDEYKRSMDPGYPKMIAHDFPGIGHKVDAVFMKDGFFYFFHGTRQYKFDPKTKRILTLQKANSWFNCRKN

SEQ ID NO: 365 - protein, 450 aa, Artificial Sequence
  MMP-1 variant A176F
FPATLETQEQDVDLVQKYLEKYYNLKNDGRQVEKRRNSGPVVEKLKQMQEFFGLKVTGKPDAETLKVMKQPRCGVPDVAQFVLTEGNPRWEQTHLTYRIENYTPDLPRADVDHAIEKAFQLWSNVTPLTFTKVSEGQADIMISFVRGDHRDNSPFDGPGGNLAHAFQPGPGIGGDFHFDEDERWTNNFREYNLHRVAAHELGHSLGLSHSTDIGALMYPSYTFSGDVQLAQDDIDGIQAIYGRSQNPVQPIGPQTPKACDSKLTFDAITTIRGEVMFFKDRFYMRTNPFYPEVELNFISVFWPQLPNGLEAAYEFADRDEVRFFKGNKYWAVQGQNVLHGYPKDIYSSFGFPRTVKHIDAALSEENTGKTYFFVANKYWRYDEYKRSMDPGYPKMIAHDFPGIGHKVDAVFMKDGFFYFFHGTRQYKFDPKTKRILTLQKANSWFNCRKN

SEQ ID NO: 366 - protein, 450 aa, Artificial Sequence
  MMP-1 variant A176W
FPATLETQEQDVDLVQKYLEKYYNLKNDGRQVEKRRNSGPVVEKLKQMQEFFGLKVTGKPDAETLKVMKQPRCGVPDVAQFVLTEGNPRWEQTHLTYRIENYTPDLPRADVDHAIEKAFQLWSNVTPLTFTKVSEGQADIMISFVRGDHRDNSPFDGPGGNLAHAFQPGPGIGGDWHFDEDERWTNNFREYNLHRVAAHELGHSLGLSHSTDIGALMYPSYTFSGDVQLAQDDIDGIQAIYGRSQNPVQPIGPQTPKACDSKLTFDAITTIRGEVMFFKDRFYMRTNPFYPEVELNFISVFWPQLPNGLEAAYEFADRDEVRFFKGNKYWAVQGQNVLHGYPKDIYSSFGFPRTVKHIDAALSEENTGKTYFFVANKYWRYDEYKRSMDPGYPKMIAHDFPGIGHKVDAVFMKDGFFYFFHGTRQYKFDPKTKRILTLQKANSWFNCRKN

SEQ ID NO: 367 - protein, 450 aa, Artificial Sequence
  MMP-1 variant D179C
FPATLETQEQDVDLVQKYLEKYYNLKNDGRQVEKRRNSGPVVEKLKQMQEFFGLKVTGKPDAETLKVMKQPRCGVPDVAQFVLTEGNPRWEQTHLTYRIENYTPDLPRADVDHAIEKAFQLWSNVTPLTFTKVSEGQADIMISFVRGDHRDNSPFDGPGGNLAHAFQPGPGIGGDAHFCEDERWTNNFREYNLHRVAAHELGHSLGLSHSTDIGALMYPSYTFSGDVQLAQDDIDGIQAIYGRSQNPVQPIGPQTPKACDSKLTFDAITTIRGEVMFFKDRFYMRTNPFYPEVELNFISVFWPQLPNGLEAAYEFADRDEVRFFKGNKYWAVQGQNVLHGYPKDIYSSFGFPRTVKHIDAALSEENTGKTYFFVANKYWRYDEYKRSMDPGYPKMIAHDFPGIGHKVDAVFMKDGFFYFFHGTRQYKFDPKTKRILTLQKANSWFNCRKN

SEQ ID NO: 368 - protein, 450 aa, Artificial Sequence
  MMP-1 variant D179N
FPATLETQEQDVDLVQKYLEKYYNLKNDGRQVEKRRNSGPVVEKLKQMQEFFGLKVTGKPDAETLKVMKQPRCGVPDVAQFVLTEGNPRWEQTHLTYRIENYTPDLPRADVDHAIEKAFQLWSNVTPLTFTKVSEGQADIMISFVRGDHRDNSPFDGPGGNLAHAFQPGPGIGGDAHFNEDERWTNNFREYNLHRVAAHELGHSLGLSHSTDIGALMYPSYTFSGDVQLAQDDIDGIQAIYGRSQNPVQPIGPQTPKACDSKLTFDAITTIRGEVMFFKDRFYMRTNPFYPEVELNFISVFWPQLPNGLEAAYEFADRDEVRFFKGNKYWAVQGQNVLHGYPKDIYSSFGFPRTVKHIDAALSEENTGKTYFFVANKYWRYDEYKRSMDPGYPKMIAHDFPGIGHKVDAVFMKDGFFYFFHGTRQYKFDPKTKRILTLQKANSWFNCRKN

SEQ ID NO: 369 - protein, 450 aa, Artificial Sequence
  MMP-1 variant D179V
FPATLETQEQDVDLVQKYLEKYYNLKNDGRQVEKRRNSGPVVEKLKQMQEFFGLKVTGKPDAETLKVMKQPRCGVPDVAQFVLTEGNPRWEQTHLTYRIENYTPDLPRADVDHAIEKAFQLWSNVTPLTFTKVSEGQADIMISFVRGDHRDNSPFDGPGGNLAHAFQPGPGIGGDAHFVEDERWTNNFREYNLHRVAAHELGHSLGLSHSTDIGALMYPSYTFSGDVQLAQDDIDGIQAIYGRSQNPVQPIGPQTPKACDSKLTFDAITTIRGEVMFFKDRFYMRTNPFYPEVELNFISVFWPQLPNGLEAAYEFADRDEVRFFKGNKYWAVQGQNVLHGYPKDIYSSFGFPRTVKHIDAALSEENTGKTYFFVANKYWRYDEYKRSMDPGYPKMIAHDFPGIGHKVDAVFMKDGFFYFFHGTRQYKFDPKTKRILTLQKANSWFNCRKN

SEQ ID NO: 370 - protein, 450 aa, Artificial Sequence
  MMP-1 variant E180D
FPATLETQEQDVDLVQKYLEKYYNLKNDGRQVEKRRNSGPVVEKLKQMQEFFGLKVTGKPDAETLKVMKQPRCGVPDVAQFVLTEGNPRWEQTHLTYRIENYTPDLPRADVDHAIEKAFQLWSNVTPLTFTKVSEGQADIMISFVRGDHRDNSPFDGPGGNLAHAFQPGPGIGGDAHFDDDERWTNNFREYNLHRVAAHELGHSLGLSHSTDIGALMYPSYTFSGDVQLAQDDIDGIQAIYGRSQNPVQPIGPQTPKACDSKLTFDAITTIRGEVMFFKDRFYMRTNPFYPEVELNFISVFWPQLPNGLEAAYEFADRDEVRFFKGNKYWAVQGQNVLHGYPKDIYSSFGFPRTVKHIDAALSEENTGKTYFFVANKYWRYDEYKRSMDPGYPKMIAHDFPGIGHKVDAVFMKDGFFYFFHGTRQYKFDPKTKRILTLQKANSWFNCRKN

SEQ ID NO: 371 - protein, 450 aa, Artificial Sequence
  MMP-1 variant E180R
FPATLETQEQDVDLVQKYLEKYYNLKNDGRQVEKRRNSGPVVEKLKQMQEFFGLKVTGKPDAETLKVMKQPRCGVPDVAQFVLTEGNPRWEQTHLTYRIENYTPDLPRADVDHAIEKAFQLWSNVTPLTFTKVSEGQADIMISFVRGDHRDNSPFDGPGGNLAHAFQPGPGIGGDAHFDRDERWTNNFREYNLHRVAAHELGHSLGLSHSTDIGALMYPSYTFSGDVQLAQDDIDGIQAIYGRSQNPVQPIGPQTPKACDSKLTFDAITTIRGEVMFFKDRFYMRTNPFYPEVELNFISVFWPQLPNGLEAAYEFADRDEVRFFKGNKYWAVQGQNVLHGYPKDIYSSFGFPRTVKHIDAALSEENTGKTYFFVANKYWRYDEYKRSMDPGYPKMIAHDFPGIGHKVDAVFMKDGFFYFFHGTRQYKFDPKTKRILTLQKANSWFNCRKN

SEQ ID NO: 372 - protein, 450 aa, Artificial Sequence
  MMP-1 variant E180N
FPATLETQEQDVDLVQKYLEKYYNLKNDGRQVEKRRNSGPVVEKLKQMQEFFGLKVTGKPDAETLKVMKQPRCGVPDVAQFVLTEGNPRWEQTHLTYRIENYTPDLPRADVDHAIEKAFQLWSNVTPLTFTKVSEGQADIMISFVRGDHRDNSPFDGPGGNLAHAFQPGPGIGGDAHFDNDERWTNNFREYNLHRVAAHELGHSLGLSHSTDIGALMYPSYTFSGDVQLAQDDIDGIQAIYGRSQNPVQPIGPQTPKACDSKLTFDAITTIRGEVMFFKDRFYMRTNPFYPEVELNFISVFWPQLPNGLEAAYEFADRDEVRFFKGNKYWAVQGQNVLHGYPKDIYSSFGFPRTVKHIDAALSEENTGKTYFFVANKYWRYDEYKRSMDPGYPKMIAHDFPGIGHKVDAVFMKDGFFYFFHGTRQYKFDPKTKRILTLQKANSWFNCRKN

SEQ ID NO: 373 - protein, 450 aa, Artificial Sequence
  MMP-1 variant E180T
FPATLETQEQDVDLVQKYLEKYYNLKNDGRQVEKRRNSGPVVEKLKQMQEFFGLKVTGKPDAETLKVMKQPRCGVPDVAQFVLTEGNPRWEQTHLTYRIENYTPDLPRADVDHAIEKAFQLWSNVTPLTFTKVSEGQADIMISFVRGDHRDNSPFDGPGGNLAHAFQPGPGIGGDAHFDTDERWTNNFREYNLHRVAAHELGHSLGLSHSTDIGALMYPSYTFSGDVQLAQDDIDGIQAIYGRSQNPVQPIGPQTPKACDSKLTFDAITTIRGEVMFFKDRFYMRTNPFYPEVELNFISVFWPQLPNGLEAAYEFADRDEVRFFKGNKYWAVQGQNVLHGYPKDIYSSFGFPRTVKHIDAALSEENTGKTYFFVANKYWRYDEYKRSMDPGYPKMIAHDFPGIGHKVDAVFMKDGFFYFFHGTRQYKFDPKTKRILTLQKANSWFNCRKN

SEQ ID NO: 374 - protein, 450 aa, Artificial Sequence
  MMP-1 variant E180Y
FPATLETQEQDVDLVQKYLEKYYNLKNDGRQVEKRRNSGPVVEKLKQMQEFFGLKVTGKPDAETLKVMKQPRCGVPDVAQFVLTEGNPRWEQTHLTYRIENYTPDLPRADVDHAIEKAFQLWSNVTPLTFTKVSEGQADIMISFVRGDHRDNSPFDGPGGNLAHAFQPGPGIGGDAHFDYDERWTNNFREYNLHRVAAHELGHSLGLSHSTDIGALMYPSYTFSGDVQLAQDDIDGIQAIYGRSQNPVQPIGPQTPKACDSKLTFDAITTIRGEVMFFKDRFYMRTNPFYPEVELNFISVFWPQLPNGLEAAYEFADRDEVRFFKGNKYWAVQGQNVLHGYPKDIYSSFGFPRTVKHIDAALSEENTGKTYFFVANKYWRYDEYKRSMDPGYPKMIAHDFPGIGHKVDAVFMKDGFFYFFHGTRQYKFDPKTKRILTLQKANSWFNCRKN

SEQ ID NO: 375 - protein, 450 aa, Artificial Sequence
  MMP-1 variant E180S
FPATLETQEQDVDLVQKYLEKYYNLKNDGRQVEKRRNSGPVVEKLKQMQEFFGLKVTGKPDAETLKVMKQPRCGVPDVAQFVLTEGNPRWEQTHLTYRIENYTPDLPRADVDHAIEKAFQLWSNVTPLTFTKVSEGQADIMISFVRGDHRDNSPFDGPGGNLAHAFQPGPGIGGDAHFDSDERWTNNFREYNLHRVAAHELGHSLGLSHSTDIGALMYPSYTFSGDVQLAQDDIDGIQAIYGRSQNPVQPIGPQTPKACDSKLTFDAITTIRGEVMFFKDRFYMRTNPFYPEVELNFISVFWPQLPNGLEAAYEFADRDEVRFFKGNKYWAVQGQNVLHGYPKDIYSSFGFPRTVKHIDAALSEENTGKTYFFVANKYWRYDEYKRSMDPGYPKMIAHDFPGIGHKVDAVFMKDGFFYFFHGTRQYKFDPKTKRILTLQKANSWFNCRKN

SEQ ID NO: 376 - protein, 450 aa, Artificial Sequence
  MMP-1 variant E180G
FPATLETQEQDVDLVQKYLEKYYNLKNDGRQVEKRRNSGPVVEKLKQMQEFFGLKVTGKPDAETLKVMKQPRCGVPDVAQFVLTEGNPRWEQTHLTYRIENYTPDLPRADVDHAIEKAFQLWSNVTPLTFTKVSEGQADIMISFVRGDHRDNSPFDGPGGNLAHAFQPGPGIGGDAHFDGDERWTNNFREYNLHRVAAHELGHSLGLSHSTDIGALMYPSYTFSGDVQLAQDDIDGIQAIYGRSQNPVQPIGPQTPKACDSKLTFDAITTIRGEVMFFKDRFYMRTNPFYPEVELNFISVFWPQLPNGLEAAYEFADRDEVRFFKGNKYWAVQGQNVLHGYPKDIYSSFGFPRTVKHIDAALSEENTGKTYFFVANKYWRYDEYKRSMDPGYPKMIAHDFPGIGHKVDAVFMKDGFFYFFHGTRQYKFDPKTKRILTLQKANSWFNCRKN

SEQ ID NO: 377 - protein, 450 aa, Artificial Sequence
  MMP-1 variant E180F
FPATLETQEQDVDLVQKYLEKYYNLKNDGRQVEKRRNSGPVVEKLKQMQEFFGLKVTGKPDAETLKVMKQPRCGVPDVAQFVLTEGNPRWEQTHLTYRIENYTPDLPRADVDHAIEKAFQLWSNVTPLTFTKVSEGQADIMISFVRGDHRDNSPFDGPGGNLAHAFQPGPGIGGDAHFDFDERWTNNFREYNLHRVAAHELGHSLGLSHSTDIGALMYPSYTFSGDVQLAQDDIDGIQAIYGRSQNPVQPIGPQTPKACDSKLTFDAITTIRGEVMFFKDRFYMRTNPFYPEVELNFISVFWPQLPNGLEAAYEFADRDEVRFFKGNKYWAVQGQNVLHGYPKDIYSSFGFPRTVKHIDAALSEENTGKTYFFVANKYWRYDEYKRSMDPGYPKMIAHDFPGIGHKVDAVFMKDGFFYFFHGTRQYKFDPKTKRILTLQKANSWFNCRKN

SEQ ID NO: 378 - protein, 450 aa, Artificial Sequence
  MMP-1 variant D181K
FPATLETQEQDVDLVQKYLEKYYNLKNDGRQVEKRRNSGPVVEKLKQMQEFFGLKVTGKPDAETLKVMKQPRCGVPDVAQFVLTEGNPRWEQTHLTYRIENYTPDLPRADVDHAIEKAFQLWSNVTPLTFTKVSEGQADIMISFVRGDHRDNSPFDGPGGNLAHAFQPGPGIGGDAHFDEKERWTNNFREYNLHRVAAHELGHSLGLSHSTDIGALMYPSYTFSGDVQLAQDDIDGIQAIYGRSQNPVQPIGPQTPKACDSKLTFDAITTIRGEVMFFKDRFYMRTNPFYPEVELNFISVFWPQLPNGLEAAYEFADRDEVRFFKGNKYWAVQGQNVLHGYPKDIYSSFGFPRTVKHIDAALSEENTGKTYFFVANKYWRYDEYKRSMDPGYPKMIAHDFPGIGHKVDAVFMKDGFFYFFHGTRQYKFDPKTKRILTLQKANSWFNCRKN

SEQ ID NO: 379 - protein, 450 aa, Artificial Sequence
  MMP-1 variant D181C
FPATLETQEQDVDLVQKYLEKYYNLKNDGRQVEKRRNSGPVVEKLKQMQEFFGLKVTGKPDAETLKVMKQPRCGVPDVAQFVLTEGNPRWEQTHLTYRIENYTPDLPRADVDHAIEKAFQLWSNVTPLTFTKVSEGQADIMISFVRGDHRDNSPFDGPGGNLAHAFQPGPGIGGDAHFDECERWTNNFREYNLHRVAAHELGHSLGLSHSTDIGALMYPSYTFSGDVQLAQDDIDGIQAIYGRSQNPVQPIGPQTPKACDSKLTFDAITTIRGEVMFFKDRFYMRTNPFYPEVELNFISVFWPQLPNGLEAAYEFADRDEVRFFKGNKYWAVQGQNVLHGYPKDIYSSFGFPRTVKHIDAALSEENTGKTYFFVANKYWRYDEYKRSMDPGYPKMIAHDFPGIGHKVDAVFMKDGFFYFFHGTRQYKFDPKTKRILTLQKANSWFNCRKN

SEQ ID NO: 380 - protein, 450 aa, Artificial Sequence
  MMP-1 variant D181T
FPATLETQEQDVDLVQKYLEKYYNLKNDGRQVEKRRNSGPVVEKLKQMQEFFGLKVTGKPDAETLKVMKQPRCGVPDVAQFVLTEGNPRWEQTHLTYRIENYTPDLPRADVDHAIEKAFQLWSNVTPLTFTKVSEGQADIMISFVRGDHRDNSPFDGPGGNLAHAFQPGPGIGGDAHFDETERWTNNFREYNLHRVAAHELGHSLGLSHSTDIGALMYPSYTFSGDVQLAQDDIDGIQAIYGRSQNPVQPIGPQTPKACDSKLTFDAITTIRGEVMFFKDRFYMRTNPFYPEVELNFISVFWPQLPNGLEAAYEFADRDEVRFFKGNKYWAVQGQNVLHGYPKDIYSSFGFPRTVKHIDAALSEENTGKTYFFVANKYWRYDEYKRSMDPGYPKMIAHDFPGIGHKVDAVFMKDGFFYFFHGTRQYKFDPKTKRILTLQKANSWFNCRKN

SEQ ID NO: 381 - protein, 450 aa, Artificial Sequence
  MMP-1 variant D181G
FPATLETQEQDVDLVQKYLEKYYNLKNDGRQVEKRRNSGPVVEKLKQMQEFFGLKVTGKPDAETLKVMKQPRCGVPDVAQFVLTEGNPRWEQTHLTYRIENYTPDLPRADVDHAIEKAFQLWSNVTPLTFTKVSEGQADIMISFVRGDHRDNSPFDGPGGNLAHAFQPGPGIGGDAHFDEGERWTNNFREYNLHRVAAHELGHSLGLSHSTDIGALMYPSYTFSGDVQLAQDDIDGIQAIYGRSQNPVQPIGPQTPKACDSKLTFDAITTIRGEVMFFKDRFYMRTNPFYPEVELNFISVFWPQLPNGLEAAYEFADRDEVRFFKGNKYWAVQGQNVLHGYPKDIYSSFGFPRTVKHIDAALSEENTGKTYFFVANKYWRYDEYKRSMDPGYPKMIAHDFPGIGHKVDAVFMKDGFFYFFHGTRQYKFDPKTKRILTLQKANSWFNCRKN

SEQ ID NO: 382 - protein, 450 aa, Artificial Sequence
  MMP-1 variant D181L
FPATLETQEQDVDLVQKYLEKYYNLKNDGRQVEKRRNSGPVVEKLKQMQEFFGLKVTGKPDAETLKVMKQPRCGVPDVAQFVLTEGNPRWEQTHLTYRIENYTPDLPRADVDHAIEKAFQLWSNVTPLTFTKVSEGQADIMISFVRGDHRDNSPFDGPGGNLAHAFQPGPGIGGDAHFDELERWTNNFREYNLHRVAAHELGHSLGLSHSTDIGALMYPSYTFSGDVQLAQDDIDGIQAIYGRSQNPVQPIGPQTPKACDSKLTFDAITTIRGEVMFFKDRFYMRTNPFYPEVELNFISVFWPQLPNGLEAAYEFADRDEVRFFKGNKYWAVQGQNVLHGYPKDIYSSFGFPRTVKHIDAALSEENTGKTYFFVANKYWRYDEYKRSMDPGYPKMIAHDFPGIGHKVDAVFMKDGFFYFFHGTRQYKFDPKTKRILTLQKANSWFNCRKN

SEQ ID NO: 383 - protein, 450 aa, Artificial Sequence
  MMP-1 variant E182Q
FPATLETQEQDVDLVQKYLEKYYNLKNDGRQVEKRRNSGPVVEKLKQMQEFFGLKVTGKPDAETLKVMKQPRCGVPDVAQFVLTEGNPRWEQTHLTYRIENYTPDLPRADVDHAIEKAFQLWSNVTPLTFTKVSEGQADIMISFVRGDHRDNSPFDGPGGNLAHAFQPGPGIGGDAHFDEDQRWTNNFREYNLHRVAAHELGHSLGLSHSTDIGALMYPSYTFSGDVQLAQDDIDGIQAIYGRSQNPVQPIGPQTPKACDSKLTFDAITTIRGEVMFFKDRFYMRTNPFYPEVELNFISVFWPQLPNGLEAAYEFADRDEVRFFKGNKYWAVQGQNVLHGYPKDIYSSFGFPRTVKHIDAALSEENTGKTYFFVANKYWRYDEYKRSMDPGYPKMIAHDFPGIGHKVDAVFMKDGFFYFFHGTRQYKFDPKTKRILTLQKANSWFNCRKN

SEQ ID NO: 384 - protein, 450 aa, Artificial Sequence
  MMP-1 variant E182T
FPATLETQEQDVDLVQKYLEKYYNLKNDGRQVEKRRNSGPVVEKLKQMQEFFGLKVTGKPDAETLKVMKQPRCGVPDVAQFVLTEGNPRWEQTHLTYRIENYTPDLPRADVDHAIEKAFQLWSNVTPLTFTKVSEGQADIMISFVRGDHRDNSPFDGPGGNLAHAFQPGPGIGGDAHFDEDYRWTNNFREYNLHRVAAHELGHSLGLSHSTDIGALMYPSYTFSGDVQLAQDDIDGIQAIYGRSQNPVQPIGPQTPKACDSKLTFDAITTIRGEVMFFKDRFYMRTNPFYPEVELNFISVFWPQLPNGLEAAYEFADRDEVRFFKGNKYWAVQGQNVLHGYPKDIYSSFGFPRTVKHIDAALSEENTGKTYFFVANKYWRYDEYKRSMDPGYPKMIAHDFPGIGHKVDAVFMKDGFFYFFHGTRQYKFDPKTKRILTLQKANSWFNCRKN

SEQ ID NO: 385 - protein, 450 aa, Artificial Sequence
  MMP-1 variant E182G
FPATLETQEQDVDLVQKYLEKYYNLKNDGRQVEKRRNSGPVVEKLKQMQEFFGLKVTGKPDAETLKVMKQPRCGVPDVAQFVLTEGNPRWEQTHLTYRIENYTPDLPRADVDHAIEKAFQLWSNVTPLTFTKVSEGQADIMISFVRGDHRDNSPFDGPGGNLAHAFQPGPGIGGDAHFDEDGRWTNNFREYNLHRVAAHELGHSLGLSHSTDIGALMYPSYTFSGDVQLAQDDIDGIQAIYGRSQNPVQPIGPQTPKACDSKLTFDAITTIRGEVMFFKDRFYMRTNPFYPEVELNFISVFWPQLPNGLEAAYEFADRDEVRFFKGNKYWAVQGQNVLHGYPKDIYSSFGFPRTVKHIDAALSEENTGKTYFFVANKYWRYDEYKRSMDPGYPKMIAHDFPGIGHKVDAVFMKDGFFYFFHGTRQYKFDPKTKRILTLQKANSWFNCRKN

SEQ ID NO: 386 - protein, 450 aa, Artificial Sequence
  MMP-1 variant E182M
FPATLETQEQDVDLVQKYLEKYYNLKNDGRQVEKRRNSGPVVEKLKQMQEFFGLKVTGKPDAETLKVMKQPRCGVPDVAQFVLTEGNPRWEQTHLTYRIENYTPDLPRADVDHAIEKAFQLWSNVTPLTFTKVSEGQADIMISFVRGDHRDNSPFDGPGGNLAHAFQPGPGIGGDAHFDEDMRWTNNFREYNLHRVAAHELGHSLGLSHSTDIGALMYPSYTFSGDVQLAQDDIDGIQAIYGRSQNPVQPIGPQTPKACDSKLTFDAITTIRGEVMFFKDRFYMRTNPFYPEVELNFISVFWPQLPNGLEAAYEFADRDEVRFFKGNKYWAVQGQNVLHGYPKDIYSSFGFPRTVKHIDAALSEENTGKTYFFVANKYWRYDEYKRSMDPGYPKMIAHDFPGIGHKVDAVFMKDGFFYFFHGTRQYKFDPKTKRILTLQKANSWFNCRKN

SEQ ID NO: 387 - protein, 450 aa, Artificial Sequence
  MMP-1 variant T185D
FPATLETQEQDVDLVQKYLEKYYNLKNDGRQVEKRRNSGPVVEKLKQMQEFFGLKVTGKPDAETLKVMKQPRCGVPDVAQFVLTEGNPRWEQTHLTYRIENYTPDLPRADVDHAIEKAFQLWSNVTPLTFTKVSEGQADIMISFVRGDHRDNSPFDGPGGNLAHAFQPGPGIGGDAHFDEDERWDNNFREYNLHRVAAHELGHSLGLSHSTDIGALMYPSYTFSGDVQLAQDDIDGIQAIYGRSQNPVQPIGPQTPKACDSKLTFDAITTIRGEVMFFKDRFYMRTNPFYPEVELNFISVFWPQLPNGLEAAYEFADRDEVRFFKGNKYWAVQGQNVLHGYPKDIYSSFGFPRTVKHIDAALSEENTGKTYFFVANKYWRYDEYKRSMDPGYPKMIAHDFPGIGHKVDAVFMKDGFFYFFHGTRQYKFDPKTKRILTLQKANSWFNCRKN

SEQ ID NO: 388 - protein, 450 aa, Artificial Sequence
  MMP-1 variant T185E
FPATLETQEQDVDLVQKYLEKYYNLKNDGRQVEKRRNSGPVVEKLKQMQEFFGLKVTGKPDAETLKVMKQPRCGVPDVAQFVLTEGNPRWEQTHLTYRIENYTPDLPRADVDHAIEKAFQLWSNVTPLTFTKVSEGQADIMISFVRGDHRDNSPFDGPGGNLAHAFQPGPGIGGDAHFDEDERWENNFREYNLHRVAAHELGHSLGLSHSTDIGALMYPSYTFSGDVQLAQDDIDGIQAIYGRSQNPVQPIGPQTPKACDSKLTFDAITTIRGEVMFFKDRFYMRTNPFYPEVELNFISVFWPQLPNGLEAAYEFADRDEVRFFKGNKYWAVQGQNVLHGYPKDIYSSFGFPRTVKHIDAALSEENTGKTYFFVANKYWRYDEYKRSMDPGYPKMIAHDFPGIGHKVDAVFMKDGFFYFFHGTRQYKFDPKTKRILTLQKANSWFNCRKN

SEQ ID NO: 389 - protein, 450 aa, Artificial Sequence
  MMP-1 variant T185H
FPATLETQEQDVDLVQKYLEKYYNLKNDGRQVEKRRNSGPVVEKLKQMQEFFGLKVTGKPDAETLKVMKQPRCGVPDVAQFVLTEGNPRWEQTHLTYRIENYTPDLPRADVDHAIEKAFQLWSNVTPLTFTKVSEGQADIMISFVRGDHRDNSPFDGPGGNLAHAFQPGPGIGGDAHFDEDERWHNNFREYNLHRVAAHELGHSLGLSHSTDIGALMYPSYTFSGDVQLAQDDIDGIQAIYGRSQNPVQPIGPQTPKACDSKLTFDAITTIRGEVMFFKDRFYMRTNPFYPEVELNFISVFWPQLPNGLEAAYEFADRDEVRFFKGNKYWAVQGQNVLHGYPKDIYSSFGFPRTVKHIDAALSEENTGKTYFFVANKYWRYDEYKRSMDPGYPKMIAHDFPGIGHKVDAVFMKDGFFYFFHGTRQYKFDPKTKRILTLQKANSWFNCRKN

SEQ ID NO: 390 - protein, 450 aa, Artificial Sequence
  MMP-1 variant T185R
FPATLETQEQDVDLVQKYLEKYYNLKNDGRQVEKRRNSGPVVEKLKQMQEFFGLKVTGKPDAETLKVMKQPRCGVPDVAQFVLTEGNPRWEQTHLTYRIENYTPDLPRADVDHAIEKAFQLWSNVTPLTFTKVSEGQADIMISFVRGDHRDNSPFDGPGGNLAHAFQPGPGIGGDAHFDEDERWRNNFREYNLHRVAAHELGHSLGLSHSTDIGALMYPSYTFSGDVQLAQDDIDGIQAIYGRSQNPVQPIGPQTPKACDSKLTFDAITTIRGEVMFFKDRFYMRTNPFYPEVELNFISVFWPQLPNGLEAAYEFADRDEVRFFKGNKYWAVQGQNVLHGYPKDIYSSFGFPRTVKHIDAALSEENTGKTYFFVANKYWRYDEYKRSMDPGYPKMIAHDFPGIGHKVDAVFMKDGFFYFFHGTRQYKFDPKTKRILTLQKANSWFNCRKN

SEQ ID NO: 391 - protein, 450 aa, Artificial Sequence
  MMP-1 variant T185Q
FPATLETQEQDVDLVQKYLEKYYNLKNDGRQVEKRRNSGPVVEKLKQMQEFFGLKVTGKPDAETLKVMKQPRCGVPDVAQFVLTEGNPRWEQTHLTYRIENYTPDLPRADVDHAIEKAFQLWSNVTPLTFTKVSEGQADIMISFVRGDHRDNSPFDGPGGNLAHAFQPGPGIGGDAHFDEDERWQNNFREYNLHRVAAHELGHSLGLSHSTDIGALMYPSYTFSGDVQLAQDDIDGIQAIYGRSQNPVQPIGPQTPKACDSKLTFDAITTIRGEVMFFKDRFYMRTNPFYPEVELNFISVFWPQLPNGLEAAYEFADRDEVRFFKGNKYWAVQGQNVLHGYPKDIYSSFGFPRTVKHIDAALSEENTGKTYFFVANKYWRYDEYKRSMDPGYPKMIAHDFPGIGHKVDAVFMKDGFFYFFHGTRQYKFDPKTKRILTLQKANSWFNCRKN

SEQ ID NO: 392 - protein, 450 aa, Artificial Sequence
  MMP-1 variant T185Y
FPATLETQEQDVDLVQKYLEKYYNLKNDGRQVEKRRNSGPVVEKLKQMQEFFGLKVTGKPDAETLKVMKQPRCGVPDVAQFVLTEGNPRWEQTHLTYRIENYTPDLPRADVDHAIEKAFQLWSNVTPLTFTKVSEGQADIMISFVRGDHRDNSPFDGPGGNLAHAFQPGPGIGGDAHFDEDERWYNNFREYNLHRVAAHELGHSLGLSHSTDIGALMYPSYTFSGDVQLAQDDIDGIQAIYGRSQNPVQPIGPQTPKACDSKLTFDAITTIRGEVMFFKDRFYMRTNPFYPEVELNFISVFWPQLPNGLEAAYEFADRDEVRFFKGNKYWAVQGQNVLHGYPKDIYSSFGFPRTVKHIDAALSEENTGKTYFFVANKYWRYDEYKRSMDPGYPKMIAHDFPGIGHKVDAVFMKDGFFYFFHGTRQYKFDPKTKRILTLQKANSWFNCRKN

SEQ ID NO: 393 - protein, 450 aa, Artificial Sequence
  MMP-1 variant T185G
FPATLETQEQDVDLVQKYLEKYYNLKNDGRQVEKRRNSGPVVEKLKQMQEFFGLKVTGKPDAETLKVMKQPRCGVPDVAQFVLTEGNPRWEQTHLTYRIENYTPDLPRADVDHAIEKAFQLWSNVTPLTFTKVSEGQADIMISFVRGDHRDNSPFDGPGGNLAHAFQPGPGIGGDAHFDEDERWGNNFREYNLHRVAAHELGHSLGLSHSTDIGALMYPSYTFSGDVQLAQDDIDGIQAIYGRSQNPVQPIGPQTPKACDSKLTFDAITTIRGEVMFFKDRFYMRTNPFYPEVELNFISVFWPQLPNGLEAAYEFADRDEVRFFKGNKYWAVQGQNVLHGYPKDIYSSFGFPRTVKHIDAALSEENTGKTYFFVANKYWRYDEYKRSMDPGYPKMIAHDFPGIGHKVDAVFMKDGFFYFFHGTRQYKFDPKTKRILTLQKANSWFNCRKN

SEQ ID NO: 394 - protein, 450 aa, Artificial Sequence; identical to SEQ ID NO: 327
  MMP-1 variant T185V

SEQ ID NO: 395 - protein, 450 aa, Artificial Sequence
  MMP-1 variant T185A
FPATLETQEQDVDLVQKYLEKYYNLKNDGRQVEKRRNSGPVVEKLKQMQEFFGLKVTGKPDAETLKVMKQPRCGVPDVAQFVLTEGNPRWEQTHLTYRIENYTPDLPRADVDHAIEKAFQLWSNVTPLTFTKVSEGQADIMISFVRGDHRDNSPFDGPGGNLAHAFQPGPGIGGDAHFDEDERWANNFREYNLHRVAAHELGHSLGLSHSTDIGALMYPSYTFSGDVQLAQDDIDGIQAIYGRSQNPVQPIGPQTPKACDSKLTFDAITTIRGEVMFFKDRFYMRTNPFYPEVELNFISVFWPQLPNGLEAAYEFADRDEVRFFKGNKYWAVQGQNVLHGYPKDIYSSFGFPRTVKHIDAALSEENTGKTYFFVANKYWRYDEYKRSMDPGYPKMIAHDFPGIGHKVDAVFMKDGFFYFFHGTRQYKFDPKTKRILTLQKANSWFNCRKN

SEQ ID NO: 396 - protein, 450 aa, Artificial Sequence
  MMP-1 variant N187H
FPATLETQEQDVDLVQKYLEKYYNLKNDGRQVEKRRNSGPVVEKLKQMQEFFGLKVTGKPDAETLKVMKQPRCGVPDVAQFVLTEGNPRWEQTHLTYRIENYTPDLPRADVDHAIEKAFQLWSNVTPLTFTKVSEGQADIMISFVRGDHRDNSPFDGPGGNLAHAFQPGPGIGGDAHFDEDERWTNHFREYNLHRVAAHELGHSLGLSHSTDIGALMYPSYTFSGDVQLAQDDIDGIQAIYGRSQNPVQPIGPQTPKACDSKLTFDAITTIRGEVMFFKDRFYMRTNPFYPEVELNFISVFWPQLPNGLEAAYEFADRDEVRFFKGNKYWAVQGQNVLHGYPKDIYSSFGFPRTVKHIDAALSEENTGKTYFFVANKYWRYDEYKRSMDPGYPKMIAHDFPGIGHKVDAVFMKDGFFYFFHGTRQYKFDPKTKRILTLQKANSWFNCRKN

SEQ ID NO: 397 - protein, 450 aa, Artificial Sequence
  MMP-1 variant N187K
FPATLETQEQDVDLVQKYLEKYYNLKNDGRQVEKRRNSGPVVEKLKQMQEFFGLKVTGKPDAETLKVMKQPRCGVPDVAQFVLTEGNPRWEQTHLTYRIENYTPDLPRADVDHAIEKAFQLWSNVTPLTFTKVSEGQADIMISFVRGDHRDNSPFDGPGGNLAHAFQPGPGIGGDAHFDEDERWTNKFREYNLHRVAAHELGHSLGLSHSTDIGALMYPSYTFSGDVQLAQDDIDGIQAIYGRSQNPVQPIGPQTPKACDSKLTFDAITTIRGEVMFFKDRFYMRTNPFYPEVELNFISVFWPQLPNGLEAAYEFADRDEVRFFKGNKYWAVQGQNVLHGYPKDIYSSFGFPRTVKHIDAALSEENTGKTYFFVANKYWRYDEYKRSMDPGYPKMIAHDFPGIGHKVDAVFMKDGFFYFFHGTRQYKFDPKTKRILTLQKANSWFNCRKN

SEQ ID NO: 398 - protein, 450 aa, Artificial Sequence
  MMP-1 variant N187R
FPATLETQEQDVDLVQKYLEKYYNLKNDGRQVEKRRNSGPVVEKLKQMQEFFGLKVTGKPDAETLKVMKQPRCGVPDVAQFVLTEGNPRWEQTHLTYRIENYTPDLPRADVDHAIEKAFQLWSNVTPLTFTKVSEGQADIMISFVRGDHRDNSPFDGPGGNLAHAFQPGPGIGGDAHFDEDERWTNRFREYNLHRVAAHELGHSLGLSHSTDIGALMYPSYTFSGDVQLAQDDIDGIQAIYGRSQNPVQPIGPQTPKACDSKLTFDAITTIRGEVMFFKDRFYMRTNPFYPEVELNFISVFWPQLPNGLEAAYEFADRDEVRFFKGNKYWAVQGQNVLHGYPKDIYSSFGFPRTVKHIDAALSEENTGKTYFFVANKYWRYDEYKRSMDPGYPKMIAHDFPGIGHKVDAVFMKDGFFYFFHGTRQYKFDPKTKRILTLQKANSWFNCRKN

SEQ ID NO: 399 - protein, 450 aa, Artificial Sequence
  MMP-1 variant N187C
FPATLETQEQDVDLVQKYLEKYYNLKNDGRQVEKRRNSGPVVEKLKQMQEFFGLKVTGKPDAETLKVMKQPRCGVPDVAQFVLTEGNPRWEQTHLTYRIENYTPDLPRADVDHAIEKAFQLWSNVTPLTFTKVSEGQADIMISFVRGDHRDNSPFDGPGGNLAHAFQPGPGIGGDAHFDEDERWTNCFREYNLHRVAAHELGHSLGLSHSTDIGALMYPSYTFSGDVQLAQDDIDGIQAIYGRSQNPVQPIGPQTPKACDSKLTFDAITTIRGEVMFFKDRFYMRTNPFYPEVELNFISVFWPQLPNGLEAAYEFADRDEVRFFKGNKYWAVQGQNVLHGYPKDIYSSFGFPRTVKHIDAALSEENTGKTYFFVANKYWRYDEYKRSMDPGYPKMIAHDFPGIGHKVDAVFMKDGFFYFFHGTRQYKFDPKTKRILTLQKANSWFNCRKN

SEQ ID NO: 400 - protein, 450 aa, Artificial Sequence
  MMP-1 variant N187G
FPATLETQEQDVDLVQKYLEKYYNLKNDGRQVEKRRNSGPVVEKLKQMQEFFGLKVTGKPDAETLKVMKQPRCGVPDVAQFVLTEGNPRWEQTHLTYRIENYTPDLPRADVDHAIEKAFQLWSNVTPLTFTKVSEGQADIMISFVRGDHRDNSPFDGPGGNLAHAFQPGPGIGGDAHFDEDERWTNGFREYNLHRVAAHELGHSLGLSHSTDIGALMYPSYTFSGDVQLAQDDIDGIQAIYGRSQNPVQPIGPQTPKACDSKLTFDAITTIRGEVMFFKDRFYMRTNPFYPEVELNFISVFWPQLPNGLEAAYEFADRDEVRFFKGNKYWAVQGQNVLHGYPKDIYSSFGFPRTVKHIDAALSEENTGKTYFFVANKYWRYDEYKRSMDPGYPKMIAHDFPGIGHKVDAVFMKDGFFYFFHGTRQYKFDPKTKRILTLQKANSWFNCRKN

SEQ ID NO: 401 - protein, 450 aa, Artificial Sequence
  MMP-1 variant N187F
FPATLETQEQDVDLVQKYLEKYYNLKNDGRQVEKRRNSGPVVEKLKQMQEFFGLKVTGKPDAETLKVMKQPRCGVPDVAQFVLTEGNPRWEQTHLTYRIENYTPDLPRADVDHAIEKAFQLWSNVTPLTFTKVSEGQADIMISFVRGDHRDNSPFDGPGGNLAHAFQPGPGIGGDAHFDEDERWTNFFREYNLHRVAAHELGHSLGLSHSTDIGALMYPSYTFSGDVQLAQDDIDGIQAIYGRSQNPVQPIGPQTPKACDSKLTFDAITTIRGEVMFFKDRFYMRTNPFYPEVELNFISVFWPQLPNGLEAAYEFADRDEVRFFKGNKYWAVQGQNVLHGYPKDIYSSFGFPRTVKHIDAALSEENTGKTYFFVANKYWRYDEYKRSMDPGYPKMIAHDFPGIGHKVDAVFMKDGFFYFFHGTRQYKFDPKTKRILTLQKANSWFNCRKN

SEQ ID NO: 402 - protein, 450 aa, Artificial Sequence
  MMP-1 variant N187M
FPATLETQEQDVDLVQKYLEKYYNLKNDGRQVEKRRNSGPVVEKLKQMQEFFGLKVTGKPDAETLKVMKQPRCGVPDVAQFVLTEGNPRWEQTHLTYRIENYTPDLPRADVDHAIEKAFQLWSNVTPLTFTKVSEGQADIMISFVRGDHRDNSPFDGPGGNLAHAFQPGPGIGGDAHFDEDERWTNMFREYNLHRVAAHELGHSLGLSHSTDIGALMYPSYTFSGDVQLAQDDIDGIQAIYGRSQNPVQPIGPQTPKACDSKLTFDAITTIRGEVMFFKDRFYMRTNPFYPEVELNFISVFWPQLPNGLEAAYEFADRDEVRFFKGNKYWAVQGQNVLHGYPKDIYSSFGFPRTVKHIDAALSEENTGKTYFFVANKYWRYDEYKRSMDPGYPKMIAHDFPGIGHKVDAVFMKDGFFYFFHGTRQYKFDPKTKRILTLQKANSWFNCRKN

SEQ ID NO: 403 - protein, 450 aa, Artificial Sequence
  MMP-1 variant N187W
FPATLETQEQDVDLVQKYLEKYYNLKNDGRQVEKRRNSGPVVEKLKQMQEFFGLKVTGKPDAETLKVMKQPRCGVPDVAQFVLTEGNPRWEQTHLTYRIENYTPDLPRADVDHAIEKAFQLWSNVTPLTFTKVSEGQADIMISFVRGDHRDNSPFDGPGGNLAHAFQPGPGIGGDAHFDEDERWTNWFREYNLHRVAAHELGHSLGLSHSTDIGALMYPSYTFSGDVQLAQDDIDGIQAIYGRSQNPVQPIGPQTPKACDSKLTFDAITTIRGEVMFFKDRFYMRTNPFYPEVELNFISVFWPQLPNGLEAAYEFADRDEVRFFKGNKYWAVQGQNVLHGYPKDIYSSFGFPRTVKHIDAALSEENTGKTYFFVANKYWRYDEYKRSMDPGYPKMIAHDFPGIGHKVDAVFMKDGFFYFFHGTRQYKFDPKTKRILTLQKANSWFNCRKN

SEQ ID NO: 404 - protein, 450 aa, Artificial Sequence
  MMP-1 variant N187I
FPATLETQEQDVDLVQKYLEKYYNLKNDGRQVEKRRNSGPVVEKLKQMQEFFGLKVTGKPDAETLKVMKQPRCGVPDVAQFVLTEGNPRWEQTHLTYRIENYTPDLPRADVDHAIEKAFQLWSNVTPLTFTKVSEGQADIMISFVRGDHRDNSPFDGPGGNLAHAFQPGPGIGGDAHFDEDERWTNIFREYNLHRVAAHELGHSLGLSHSTDIGALMYPSYTFSGDVQLAQDDIDGIQAIYGRSQNPVQPIGPQTPKACDSKLTFDAITTIRGEVMFFKDRFYMRTNPFYPEVELNFISVFWPQLPNGLEAAYEFADRDEVRFFKGNKYWAVQGQNVLHGYPKDIYSSFGFPRTVKHIDAALSEENTGKTYFFVANKYWRYDEYKRSMDPGYPKMIAHDFPGIGHKVDAVFMKDGFFYFFHGTRQYKFDPKTKRILTLQKANSWFNCRKN

SEQ ID NO: 405 - protein, 450 aa, Artificial Sequence
  MMP-1 variant N187A
FPATLETQEQDVDLVQKYLEKYYNLKNDGRQVEKRRNSGPVVEKLKQMQEFFGLKVTGKPDAETLKVMKQPRCGVPDVAQFVLTEGNPRWEQTHLTYRIENYTPDLPRADVDHAIEKAFQLWSNVTPLTFTKVSEGQADIMISFVRGDHRDNSPFDGPGGNLAHAFQPGPGIGGDAHFDEDERWTNAFREYNLHRVAAHELGHSLGLSHSTDIGALMYPSYTFSGDVQLAQDDIDGIQAIYGRSQNPVQPIGPQTPKACDSKLTFDAITTIRGEVMFFKDRFYMRTNPFYPEVELNFISVFWPQLPNGLEAAYEFADRDEVRFFKGNKYWAVQGQNVLHGYPKDIYSSFGFPRTVKHIDAALSEENTGKTYFFVANKYWRYDEYKRSMDPGYPKMIAHDFPGIGHKVDAVFMKDGFFYFFHGTRQYKFDPKTKRILTLQKANSWFNCRKN

SEQ ID NO: 406 - protein, 450 aa, Artificial Sequence
  MMP-1 variant R195D
FPATLETQEQDVDLVQKYLEKYYNLKNDGRQVEKRRNSGPVVEKLKQMQEFFGLKVTGKPDAETLKVMKQPRCGVPDVAQFVLTEGNPRWEQTHLTYRIENYTPDLPRADVDHAIEKAFQLWSNVTPLTFTKVSEGQADIMISFVRGDHRDNSPFDGPGGNLAHAFQPGPGIGGDAHFDEDERWTNNFREYNLHDVAAHELGHSLGLSHSTDIGALMYPSYTFSGDVQLAQDDIDGIQAIYGRSQNPVQPIGPQTPKACDSKLTFDAITTIRGEVMFFKDRFYMRTNPFYPEVELNFISVFWPQLPNGLEAAYEFADRDEVRFFKGNKYWAVQGQNVLHGYPKDIYSSFGFPRTVKHIDAALSEENTGKTYFFVANKYWRYDEYKRSMDPGYPKMIAHDFPGIGHKVDAVFMKDGFFYFFHGTRQYKFDPKTKRILTLQKANSWFNCRKN

SEQ ID NO: 407 - protein, 450 aa, Artificial Sequence
  MMP-1 variant R195C
FPATLETQEQDVDLVQKYLEKYYNLKNDGRQVEKRRNSGPVVEKLKQMQEFFGLKVTGKPDAETLKVMKQPRCGVPDVAQFVLTEGNPRWEQTHLTYRIENYTPDLPRADVDHAIEKAFQLWSNVTPLTFTKVSEGQADIMISFVRGDHRDNSPFDGPGGNLAHAFQPGPGIGGDAHFDEDERWTNNFREYNLHCVAAHELGHSLGLSHSTDIGALMYPSYTFSGDVQLAQDDIDGIQAIYGRSQNPVQPIGPQTPKACDSKLTFDAITTIRGEVMFFKDRFYMRTNPFYPEVELNFISVFWPQLPNGLEAAYEFADRDEVRFFKGNKYWAVQGQNVLHGYPKDIYSSFGFPRTVKHIDAALSEENTGKTYFFVANKYWRYDEYKRSMDPGYPKMIAHDFPGIGHKVDAVFMKDGFFYFFHGTRQYKFDPKTKRILTLQKANSWFNCRKN

SEQ ID NO: 408 - protein, 450 aa, Artificial Sequence
  MMP-1 variant R195Q
FPATLETQEQDVDLVQKYLEKYYNLKNDGRQVEKRRNSGPVVEKLKQMQEFFGLKVTGKPDAETLKVMKQPRCGVPDVAQFVLTEGNPRWEQTHLTYRIENYTPDLPRADVDHAIEKAFQLWSNVTPLTFTKVSEGQADIMISFVRGDHRDNSPFDGPGGNLAHAFQPGPGIGGDAHFDEDERWTNNFREYNLHQVAAHELGHSLGLSHSTDIGALMYPSYTFSGDVQLAQDDIDGIQAIYGRSQNPVQPIGPQTPKACDSKLTFDAITTIRGEVMFFKDRFYMRTNPFYPEVELNFISVFWPQLPNGLEAAYEFADRDEVRFFKGNKYWAVQGQNVLHGYPKDIYSSFGFPRTVKHIDAALSEENTGKTYFFVANKYWRYDEYKRSMDPGYPKMIAHDFPGIGHKVDAVFMKDGFFYFFHGTRQYKFDPKTKRILTLQKANSWFNCRKN

SEQ ID NO: 409 - protein, 450 aa, Artificial Sequence
  MMP-1 variant R195G
FPATLETQEQDVDLVQKYLEKYYNLKNDGRQVEKRRNSGPVVEKLKQMQEFFGLKVTGKPDAETLKVMKQPRCGVPDVAQFVLTEGNPRWEQTHLTYRIENYTPDLPRADVDHAIEKAFQLWSNVTPLTFTKVSEGQADIMISFVRGDHRDNSPFDGPGGNLAHAFQPGPGIGGDAHFDEDERWTNNFREYNLHGVAAHELGHSLGLSHSTDIGALMYPSYTFSGDVQLAQDDIDGIQAIYGRSQNPVQPIGPQTPKACDSKLTFDAITTIRGEVMFFKDRFYMRTNPFYPEVELNFISVFWPQLPNGLEAAYEFADRDEVRFFKGNKYWAVQGQNVLHGYPKDIYSSFGFPRTVKHIDAALSEENTGKTYFFVANKYWRYDEYKRSMDPGYPKMIAHDFPGIGHKVDAVFMKDGFFYFFHGTRQYKFDPKTKRILTLQKANSWFNCRKN

SEQ ID NO: 410 - protein, 450 aa, Artificial Sequence
  MMP-1 variant R195W
FPATLETQEQDVDLVQKYLEKYYNLKNDGRQVEKRRNSGPVVEKLKQMQEFFGLKVTGKPDAETLKVMKQPRCGVPDVAQFVLTEGNPRWEQTHLTYRIENYTPDLPRADVDHAIEKAFQLWSNVTPLTFTKVSEGQADIMISFVRGDHRDNSPFDGPGGNLAHAFQPGPGIGGDAHFDEDERWTNNFREYNLHWVAAHELGHSLGLSHSTDIGALMYPSYTFSGDVQLAQDDIDGIQAIYGRSQNPVQPIGPQTPKACDSKLTFDAITTIRGEVMFFKDRFYMRTNPFYPEVELNFISVFWPQLPNGLEAAYEFADRDEVRFFKGNKYWAVQGQNVLHGYPKDIYSSFGFPRTVKHIDAALSEENTGKTYFFVANKYWRYDEYKRSMDPGYPKMIAHDFPGIGHKVDAVFMKDGFFYFFHGTRQYKFDPKTKRILTLQKANSWFNCRKN

SEQ ID NO: 411 - protein, 450 aa, Artificial Sequence
  MMP-1 variant R195V
FPATLETQEQDVDLVQKYLEKYYNLKNDGRQVEKRRNSGPVVEKLKQMQEFFGLKVTGKPDAETLKVMKQPRCGVPDVAQFVLTEGNPRWEQTHLTYRIENYTPDLPRADVDHAIEKAFQLWSNVTPLTFTKVSEGQADIMISFVRGDHRDNSPFDGPGGNLAHAFQPGPGIGGDAHFDEDERWTNNFREYNLHVVAAHELGHSLGLSHSTDIGALMYPSYTFSGDVQLAQDDIDGIQAIYGRSQNPVQPIGPQTPKACDSKLTFDAITTIRGEVMFFKDRFYMRTNPFYPEVELNFISVFWPQLPNGLEAAYEFADRDEVRFFKGNKYWAVQGQNVLHGYPKDIYSSFGFPRTVKHIDAALSEENTGKTYFFVANKYWRYDEYKRSMDPGYPKMIAHDFPGIGHKVDAVFMKDGFFYFFHGTRQYKFDPKTKRILTLQKANSWFNCRKN

SEQ ID NO: 412 - protein, 450 aa, Artificial Sequence
  MMP-1 variant R195L
FPATLETQEQDVDLVQKYLEKYYNLKNDGRQVEKRRNSGPVVEKLKQMQEFFGLKVTGKPDAETLKVMKQPRCGVPDVAQFVLTEGNPRWEQTHLTYRIENYTPDLPRADVDHAIEKAFQLWSNVTPLTFTKVSEGQADIMISFVRGDHRDNSPFDGPGGNLAHAFQPGPGIGGDAHFDEDERWTNNFREYNLHLVAAHELGHSLGLSHSTDIGALMYPSYTFSGDVQLAQDDIDGIQAIYGRSQNPVQPIGPQTPKACDSKLTFDAITTIRGEVMFFKDRFYMRTNPFYPEVELNFISVFWPQLPNGLEAAYEFADRDEVRFFKGNKYWAVQGQNVLHGYPKDIYSSFGFPRTVKHIDAALSEENTGKTYFFVANKYWRYDEYKRSMDPGYPKMIAHDFPGIGHKVDAVFMKDGFFYFFHGTRQYKFDPKTKRILTLQKANSWFNCRKN

SEQ ID NO: 413 - protein, 450 aa, Artificial Sequence
  MMP-1 variant R195A
FPATLETQEQDVDLVQKYLEKYYNLKNDGRQVEKRRNSGPVVEKLKQMQEFFGLKVTGKPDAETLKVMKQPRCGVPDVAQFVLTEGNPRWEQTHLTYRIENYTPDLPRADVDHAIEKAFQLWSNVTPLTFTKVSEGQADIMISFVRGDHRDNSPFDGPGGNLAHAFQPGPGIGGDAHFDEDERWTNNFREYNLHAVAAHELGHSLGLSHSTDIGALMYPSYTFSGDVQLAQDDIDGIQAIYGRSQNPVQPIGPQTPKACDSKLTFDAITTIRGEVMFFKDRFYMRTNPFYPEVELNFISVFWPQLPNGLEAAYEFADRDEVRFFKGNKYWAVQGQNVLHGYPKDIYSSFGFPRTVKHIDAALSEENTGKTYFFVANKYWRYDEYKRSMDPGYPKMIAHDFPGIGHKVDAVFMKDGFFYFFHGTRQYKFDPKTKRILTLQKANSWFNCRKN

SEQ ID NO: 414 - protein, 450 aa, Artificial Sequence
  MMP-1 variant A198G
FPATLETQEQDVDLVQKYLEKYYNLKNDGRQVEKRRNSGPVVEKLKQMQEFFGLKVTGKPDAETLKVMKQPRCGVPDVAQFVLTEGNPRWEQTHLTYRIENYTPDLPRADVDHAIEKAFQLWSNVTPLTFTKVSEGQADIMISFVRGDHRDNSPFDGPGGNLAHAFQPGPGIGGDAHFDEDERWTNNFREYNLHRVAGHELGHSLGLSHSTDIGALMYPSYTFSGDVQLAQDDIDGIQAIYGRSQNPVQPIGPQTPKACDSKLTFDAITTIRGEVMFFKDRFYMRTNPFYPEVELNFISVFWPQLPNGLEAAYEFADRDEVRFFKGNKYWAVQGQNVLHGYPKDIYSSFGFPRTVKHIDAALSEENTGKTYFFVANKYWRYDEYKRSMDPGYPKMIAHDFPGIGHKVDAVFMKDGFFYFFHGTRQYKFDPKTKRILTLQKANSWFNCRKN

SEQ ID NO: 415 - protein, 450 aa, Artificial Sequence
  MMP-1 variant A198M
FPATLETQEQDVDLVQKYLEKYYNLKNDGRQVEKRRNSGPVVEKLKQMQEFFGLKVTGKPDAETLKVMKQPRCGVPDVAQFVLTEGNPRWEQTHLTYRIENYTPDLPRADVDHAIEKAFQLWSNVTPLTFTKVSEGQADIMISFVRGDHRDNSPFDGPGGNLAHAFQPGPGIGGDAHFDEDERWTNNFREYNLHRVAMHELGHSLGLSHSTDIGALMYPSYTFSGDVQLAQDDIDGIQAIYGRSQNPVQPIGPQTPKACDSKLTFDAITTIRGEVMFFKDRFYMRTNPFYPEVELNFISVFWPQLPNGLEAAYEFADRDEVRFFKGNKYWAVQGQNVLHGYPKDIYSSFGFPRTVKHIDAALSEENTGKTYFFVANKYWRYDEYKRSMDPGYPKMIAHDFPGIGHKVDAVFMKDGFFYFFHGTRQYKFDPKTKRILTLQKANSWFNCRKN

SEQ ID NO: 416 - protein, 450 aa, Artificial Sequence
  MMP-1 variant A198L
FPATLETQEQDVDLVQKYLEKYYNLKNDGRQVEKRRNSGPVVEKLKQMQEFFGLKVTGKPDAETLKVMKQPRCGVPDVAQFVLTEGNPRWEQTHLTYRIENYTPDLPRADVDHAIEKAFQLWSNVTPLTFTKVSEGQADIMISFVRGDHRDNSPFDGPGGNLAHAFQPGPGIGGDAHFDEDERWTNNFREYNLHRVALHELGHSLGLSHSTDIGALMYPSYTFSGDVQLAQDDIDGIQAIYGRSQNPVQPIGPQTPKACDSKLTFDAITTIRGEVMFFKDRFYMRTNPFYPEVELNFISVFWPQLPNGLEAAYEFADRDEVRFFKGNKYWAVQGQNVLHGYPKDIYSSFGFPRTVKHIDAALSEENTGKTYFFVANKYWRYDEYKRSMDPGYPKMIAHDFPGIGHKVDAVFMKDGFFYFFHGTRQYKFDPKTKRILTLQKANSWFNCRKN

SEQ ID NO: 417 - protein, 450 aa, Artificial Sequence
  MMP-1 variant G206S
FPATLETQEQDVDLVQKYLEKYYNLKNDGRQVEKRRNSGPVVEKLKQMQEFFGLKVTGKPDAETLKVMKQPRCGVPDVAQFVLTEGNPRWEQTHLTYRIENYTPDLPRADVDHAIEKAFQLWSNVTPLTFTKVSEGQADIMISFVRGDHRDNSPFDGPGGNLAHAFQPGPGIGGDAHFDEDERWTNNFREYNLHRVAAHELGHSLSLSHSTDIGALMYPSYTFSGDVQLAQDDIDGIQAIYGRSQNPVQPIGPQTPKACDSKLTFDAITTIRGEVMFFKDRFYMRTNPFYPEVELNFISVFWPQLPNGLEAAYEFADRDEVRFFKGNKYWAVQGQNVLHGYPKDIYSSFGFPRTVKHIDAALSEENTGKTYFFVANKYWRYDEYKRSMDPGYPKMIAHDFPGIGHKVDAVFMKDGFFYFFHGTRQYKFDPKTKRILTLQKANSWFNCRKN

SEQ ID NO: 418 - protein, 450 aa, Artificial Sequence
  MMP-1 variant G206A
FPATLETQEQDVDLVQKYLEKYYNLKNDGRQVEKRRNSGPVVEKLKQMQEFFGLKVTGKPDAETLKVMKQPRCGVPDVAQFVLTEGNPRWEQTHLTYRIENYTPDLPRADVDHAIEKAFQLWSNVTPLTFTKVSEGQADIMISFVRGDHRDNSPFDGPGGNLAHAFQPGPGIGGDAHFDEDERWTNNFREYNLHRVAAHELGHSLALSHSTDIGALMYPSYTFSGDVQLAQDDIDGIQAIYGRSQNPVQPIGPQTPKACDSKLTFDAITTIRGEVMFFKDRFYMRTNPFYPEVELNFISVFWPQLPNGLEAAYEFADRDEVRFFKGNKYWAVQGQNVLHGYPKDIYSSFGFPRTVKHIDAALSEENTGKTYFFVANKYWRYDEYKRSMDPGYPKMIAHDFPGIGHKVDAVFMKDGFFYFFHGTRQYKFDPKTKRILTLQKANSWFNCRKN

SEQ ID NO: 419 - protein, 450 aa, Artificial Sequence
  MMP-1 variant S210V
FPATLETQEQDVDLVQKYLEKYYNLKNDGRQVEKRRNSGPVVEKLKQMQEFFGLKVTGKPDAETLKVMKQPRCGVPDVAQFVLTEGNPRWEQTHLTYRIENYTPDLPRADVDHAIEKAFQLWSNVTPLTFTKVSEGQADIMISFVRGDHRDNSPFDGPGGNLAHAFQPGPGIGGDAHFDEDERWTNNFREYNLHRVAAHELGHSLGLSHVTDIGALMYPSYTFSGDVQLAQDDIDGIQAIYGRSQNPVQPIGPQTPKACDSKLTFDAITTIRGEVMFFKDRFYMRTNPFYPEVELNFISVFWPQLPNGLEAAYEFADRDEVRFFKGNKYWAVQGQNVLHGYPKDIYSSFGFPRTVKHIDAALSEENTGKTYFFVANKYWRYDEYKRSMDPGYPKMIAHDFPGIGHKVDAVFMKDGFFYFFHGTRQYKFDPKTKRILTLQKANSWFNCRKN

SEQ ID NO: 420 - protein, 450 aa, Artificial Sequence
  MMP-1 variant S210A
FPATLETQEQDVDLVQKYLEKYYNLKNDGRQVEKRRNSGPVVEKLKQMQEFFGLKVTGKPDAETLKVMKQPRCGVPDVAQFVLTEGNPRWEQTHLTYRIENYTPDLPRADVDHAIEKAFQLWSNVTPLTFTKVSEGQADIMISFVRGDHRDNSPFDGPGGNLAHAFQPGPGIGGDAHFDEDERWTNNFREYNLHRVAAHELGHSLGLSHATDIGALMYPSYTFSGDVQLAQDDIDGIQAIYGRSQNPVQPIGPQTPKACDSKLTFDAITTIRGEVMFFKDRFYMRTNPFYPEVELNFISVFWPQLPNGLEAAYEFADRDEVRFFKGNKYWAVQGQNVLHGYPKDIYSSFGFPRTVKHIDAALSEENTGKTYFFVANKYWRYDEYKRSMDPGYPKMIAHDFPGIGHKVDAVFMKDGFFYFFHGTRQYKFDPKTKRILTLQKANSWFNCRKN

SEQ ID NO: 421 - protein, 450 aa, Artificial Sequence
  MMP-1 variant Y218S
FPATLETQEQDVDLVQKYLEKYYNLKNDGRQVEKRRNSGPVVEKLKQMQEFFGLKVTGKPDAETLKVMKQPRCGVPDVAQFVLTEGNPRWEQTHLTYRIENYTPDLPRADVDHAIEKAFQLWSNVTPLTFTKVSEGQADIMISFVRGDHRDNSPFDGPGGNLAHAFQPGPGIGGDAHFDEDERWTNNFREYNLHRVAAHELGHSLGLSHSTDIGALMSPSYTFSGDVQLAQDDIDGIQAIYGRSQNPVQPIGPQTPKACDSKLTFDAITTIRGEVMFFKDRFYMRTNPFYPEVELNFISVFWPQLPNGLEAAYEFADRDEVRFFKGNKYWAVQGQNVLHGYPKDIYSSFGFPRTVKHIDAALSEENTGKTYFFVANKYWRYDEYKRSMDPGYPKMIAHDFPGIGHKVDAVFMKDGFFYFFHGTRQYKFDPKTKRILTLQKANSWFNCRKN

SEQ ID NO: 422 - protein, 450 aa, Artificial Sequence
  MMP-1 variant F223E
FPATLETQEQDVDLVQKYLEKYYNLKNDGRQVEKRRNSGPVVEKLKQMQEFFGLKVTGKPDAETLKVMKQPRCGVPDVAQFVLTEGNPRWEQTHLTYRIENYTPDLPRADVDHAIEKAFQLWSNVTPLTFTKVSEGQADIMISFVRGDHRDNSPFDGPGGNLAHAFQPGPGIGGDAHFDEDERWTNNFREYNLHRVAAHELGHSLGLSHSTDIGALMYPSYTESGDVQLAQDDIDGIQAIYGRSQNPVQPIGPQTPKACDSKLTFDAITTIRGEVMFFKDRFYMRTNPFYPEVELNFISVFWPQLPNGLEAAYEFADRDEVRFFKGNKYWAVQGQNVLHGYPKDIYSSFGFPRTVKHIDAALSEENTGKTYFFVANKYWRYDEYKRSMDPGYPKMIAHDFPGIGHKVDAVFMKDGFFYFFHGTRQYKFDPKTKRILTLQKANSWFNCRKN

SEQ ID NO: 423 - protein, 450 aa, Artificial Sequence
  MMP-1 variant F223K
FPATLETQEQDVDLVQKYLEKYYNLKNDGRQVEKRRNSGPVVEKLKQMQEFFGLKVTGKPDAETLKVMKQPRCGVPDVAQFVLTEGNPRWEQTHLTYRIENYTPDLPRADVDHAIEKAFQLWSNVTPLTFTKVSEGQADIMISFVRGDHRDNSPFDGPGGNLAHAFQPGPGIGGDAHFDEDERWTNNFREYNLHRVAAHELGHSLGLSHSTDIGALMYPSYTKSGDVQLAQDDIDGIQAIYGRSQNPVQPIGPQTPKACDSKLTFDAITTIRGEVMFFKDRFYMRTNPFYPEVELNFISVFWPQLPNGLEAAYEFADRDEVRFFKGNKYWAVQGQNVLHGYPKDIYSSFGFPRTVKHIDAALSEENTGKTYFFVANKYWRYDEYKRSMDPGYPKMIAHDFPGIGHKVDAVFMKDGFFYFFHGTRQYKFDPKTKRILTLQKANSWFNCRKN

SEQ ID NO: 424 - protein, 450 aa, Artificial Sequence
  MMP-1 variant F223C
FPATLETQEQDVDLVQKYLEKYYNLKNDGRQVEKRRNSGPVVEKLKQMQEFFGLKVTGKPDAETLKVMKQPRCGVPDVAQFVLTEGNPRWEQTHLTYRIENYTPDLPRADVDHAIEKAFQLWSNVTPLTFTKVSEGQADIMISFVRGDHRDNSPFDGPGGNLAHAFQPGPGIGGDAHFDEDERWTNNFREYNLHRVAAHELGHSLGLSHSTDIGALMYPSYTCSGDVQLAQDDIDGIQAIYGRSQNPVQPIGPQTPKACDSKLTFDAITTIRGEVMFFKDRFYMRTNPFYPEVELNFISVFWPQLPNGLEAAYEFADRDEVRFFKGNKYWAVQGQNVLHGYPKDIYSSFGFPRTVKHIDAALSEENTGKTYFFVANKYWRYDEYKRSMDPGYPKMIAHDFPGIGHKVDAVFMKDGFFYFFHGTRQYKFDPKTKRILTLQKANSWFNCRKN

SEQ ID NO: 425 - protein, 450 aa, Artificial Sequence
  MMP-1 variant F223S
FPATLETQEQDVDLVQKYLEKYYNLKNDGRQVEKRRNSGPVVEKLKQMQEFFGLKVTGKPDAETLKVMKQPRCGVPDVAQFVLTEGNPRWEQTHLTYRIENYTPDLPRADVDHAIEKAFQLWSNVTPLTFTKVSEGQADIMISFVRGDHRDNSPFDGPGGNLAHAFQPGPGIGGDAHFDEDERWTNNFREYNLHRVAAHELGHSLGLSHSTDIGALMYPSYTSSGDVQLAQDDIDGIQAIYGRSQNPVQPIGPQTPKACDSKLTFDAITTIRGEVMFFKDRFYMRTNPFYPEVELNFISVFWPQLPNGLEAAYEFADRDEVRFFKGNKYWAVQGQNVLHGYPKDIYSSFGFPRTVKHIDAALSEENTGKTYFFVANKYWRYDEYKRSMDPGYPKMIAHDFPGIGHKVDAVFMKDGFFYFFHGTRQYKFDPKTKRILTLQKANSWFNCRKN

SEQ ID NO: 426 - protein, 450 aa, Artificial Sequence
  MMP-1 variant F223G
FPATLETQEQDVDLVQKYLEKYYNLKNDGRQVEKRRNSGPVVEKLKQMQEFFGLKVTGKPDAETLKVMKQPRCGVPDVAQFVLTEGNPRWEQTHLTYRIENYTPDLPRADVDHAIEKAFQLWSNVTPLTFTKVSEGQADIMISFVRGDHRDNSPFDGPGGNLAHAFQPGPGIGGDAHFDEDERWTNNFREYNLHRVAAHELGHSLGLSHSTDIGALMYPSYTGSGDVQLAQDDIDGIQAIYGRSQNPVQPIGPQTPKACDSKLTFDAITTIRGEVMFFKDRFYMRTNPFYPEVELNFISVFWPQLPNGLEAAYEFADRDEVRFFKGNKYWAVQGQNVLHGYPKDIYSSFGFPRTVKHIDAALSEENTGKTYFFVANKYWRYDEYKRSMDPGYPKMIAHDFPGIGHKVDAVFMKDGFFYFFHGTRQYKFDPKTKRILTLQKANSWFNCRKN

SEQ ID NO: 427 - protein, 450 aa, Artificial Sequence
  MMP-1 variant F223M
FPATLETQEQDVDLVQKYLEKYYNLKNDGRQVEKRRNSGPVVEKLKQMQEFFGLKVTGKPDAETLKVMKQPRCGVPDVAQFVLTEGNPRWEQTHLTYRIENYTPDLPRADVDHAIEKAFQLWSNVTPLTFTKVSEGQADIMISFVRGDHRDNSPFDGPGGNLAHAFQPGPGIGGDAHFDEDERWTNNFREYNLHRVAAHELGHSLGLSHSTDIGALMYPSYTMSGDVQLAQDDIDGIQAIYGRSQNPVQPIGPQTPKACDSKLTFDAITTIRGEVMFFKDRFYMRTNPFYPEVELNFISVFWPQLPNGLEAAYEFADRDEVRFFKGNKYWAVQGQNVLHGYPKDIYSSFGFPRTVKHIDAALSEENTGKTYFFVANKYWRYDEYKRSMDPGYPKMIAHDFPGIGHKVDAVFMKDGFFYFFHGTRQYKFDPKTKRILTLQKANSWFNCRKN

SEQ ID NO: 428 - protein, 450 aa, Artificial Sequence
  MMP-1 variant F223A
FPATLETQEQDVDLVQKYLEKYYNLKNDGRQVEKRRNSGPVVEKLKQMQEFFGLKVTGKPDAETLKVMKQPRCGVPDVAQFVLTEGNPRWEQTHLTYRIENYTPDLPRADVDHAIEKAFQLWSNVTPLTFTKVSEGQADIMISFVRGDHRDNSPFDGPGGNLAHAFQPGPGIGGDAHFDEDERWTNNFREYNLHRVAAHELGHSLGLSHSTDIGALMYPSYTASGDVQLAQDDIDGIQAIYGRSQNPVQPIGPQTPKACDSKLTFDAITTIRGEVMFFKDRFYMRTNPFYPEVELNFISVFWPQLPNGLEAAYEFADRDEVRFFKGNKYWAVQGQNVLHGYPKDIYSSFGFPRTVKHIDAALSEENTGKTYFFVANKYWRYDEYKRSMDPGYPKMIAHDFPGIGHKVDAVFMKDGFFYFFHGTRQYKFDPKTKRILTLQKANSWFNCRKN

SEQ ID NO: 429 - protein, 450 aa, Artificial Sequence
  MMP-1 variant V227D
FPATLETQEQDVDLVQKYLEKYYNLKNDGRQVEKRRNSGPVVEKLKQMQEFFGLKVTGKPDAETLKVMKQPRCGVPDVAQFVLTEGNPRWEQTHLTYRIENYTPDLPRADVDHAIEKAFQLWSNVTPLTFTKVSEGQADIMISFVRGDHRDNSPFDGPGGNLAHAFQPGPGIGGDAHFDEDERWTNNFREYNLHRVAAHELGHSLGLSHSTDIGALMYPSYTFSGDDQLAQDDIDGIQAIYGRSQNPVQPIGPQTPKACDSKLTFDAITTIRGEVMFFKDRFYMRTNPFYPEVELNFISVFWPQLPNGLEAAYEFADRDEVRFFKGNKYWAVQGQNVLHGYPKDIYSSFGFPRTVKHIDAALSEENTGKTYFFVANKYWRYDEYKRSMDPGYPKMIAHDFPGIGHKVDAVFMKDGFFYFFHGTRQYKFDPKTKRILTLQKANSWFNCRKN

SEQ ID NO: 430 - protein, 450 aa, Artificial Sequence
  MMP-1 variant V227E
FPATLETQEQDVDLVQKYLEKYYNLKNDGRQVEKRRNSGPVVEKLKQMQEFFGLKVTGKPDAETLKVMKQPRCGVPDVAQFVLTEGNPRWEQTHLTYRIENYTPDLPRADVDHAIEKAFQLWSNVTPLTFTKVSEGQADIMISFVRGDHRDNSPFDGPGGNLAHAFQPGPGIGGDAHFDEDERWTNNFREYNLHRVAAHELGHSLGLSHSTDIGALMYPSYTFSGDEQLAQDDIDGIQAIYGRSQNPVQPIGPQTPKACDSKLTFDAITTIRGEVMFFKDRFYMRTNPFYPEVELNFISVFWPQLPNGLEAAYEFADRDEVRFFKGNKYWAVQGQNVLHGYPKDIYSSFGFPRTVKHIDAALSEENTGKTYFFVANKYWRYDEYKRSMDPGYPKMIAHDFPGIGHKVDAVFMKDGFFYFFHGTRQYKFDPKTKRILTLQKANSWFNCRKN

SEQ ID NO: 431 - protein, 450 aa, Artificial Sequence
  MMP-1 variant V227H
FPATLETQEQDVDLVQKYLEKYYNLKNDGRQVEKRRNSGPVVEKLKQMQEFFGLKVTGKPDAETLKVMKQPRCGVPDVAQFVLTEGNPRWEQTHLTYRIENYTPDLPRADVDHAIEKAFQLWSNVTPLTFTKVSEGQADIMISFVRGDHRDNSPFDGPGGNLAHAFQPGPGIGGDAHFDEDERWTNNFREYNLHRVAAHELGHSLGLSHSTDIGALMYPSYTFSGDHQLAQDDIDGIQAIYGRSQNPVQPIGPQTPKACDSKLTFDAITTIRGEVMFFKDRFYMRTNPFYPEVELNFISVFWPQLPNGLEAAYEFADRDEVRFFKGNKYWAVQGQNVLHGYPKDIYSSFGFPRTVKHIDAALSEENTGKTYFFVANKYWRYDEYKRSMDPGYPKMIAHDFPGIGHKVDAVFMKDGFFYFFHGTRQYKFDPKTKRILTLQKANSWFNCRKN

SEQ ID NO: 432 - protein, 450 aa, Artificial Sequence
  MMP-1 variant V227R
FPATLETQEQDVDLVQKYLEKYYNLKNDGRQVEKRRNSGPVVEKLKQMQEFFGLKVTGKPDAETLKVMKQPRCGVPDVAQFVLTEGNPRWEQTHLTYRIENYTPDLPRADVDHAIEKAFQLWSNVTPLTFTKVSEGQADIMISFVRGDHRDNSPFDGPGGNLAHAFQPGPGIGGDAHFDEDERWTNNFREYNLHRVAAHELGHSLGLSHSTDIGALMYPSYTFSGDRQLAQDDIDGIQAIYGRSQNPVQPIGPQTPKACDSKLTFDAITTIRGEVMFFKDRFYMRTNPFYPEVELNFISVFWPQLPNGLEAAYEFADRDEVRFFKGNKYWAVQGQNVLHGYPKDIYSSFGFPRTVKHIDAALSEENTGKTYFFVANKYWRYDEYKRSMDPGYPKMIAHDFPGIGHKVDAVFMKDGFFYFFHGTRQYKFDPKTKRILTLQKANSWFNCRKN

SEQ ID NO: 433 - protein, 450 aa, Artificial Sequence
  MMP-1 variant V227C
FPATLETQEQDVDLVQKYLEKYYNLKNDGRQVEKRRNSGPVVEKLKQMQEFFGLKVTGKPDAETLKVMKQPRCGVPDVAQFVLTEGNPRWEQTHLTYRIENYTPDLPRADVDHAIEKAFQLWSNVTPLTFTKVSEGQADIMISFVRGDHRDNSPFDGPGGNLAHAFQPGPGIGGDAHFDEDERWTNNFREYNLHRVAAHELGHSLGLSHSTDIGALMYPSYTFSGDCQLAQDDIDGIQAIYGRSQNPVQPIGPQTPKACDSKLTFDAITTIRGEVMFFKDRFYMRTNPFYPEVELNFISVFWPQLPNGLEAAYEFADRDEVRFFKGNKYWAVQGQNVLHGYPKDIYSSFGFPRTVKHIDAALSEENTGKTYFFVANKYWRYDEYKRSMDPGYPKMIAHDFPGIGHKVDAVFMKDGFFYFFHGTRQYKFDPKTKRILTLQKANSWFNCRKN

SEQ ID NO: 434 - protein, 450 aa, Artificial Sequence
  MMP-1 variant V227Q
FPATLETQEQDVDLVQKYLEKYYNLKNDGRQVEKRRNSGPVVEKLKQMQEFFGLKVTGKPDAETLKVMKQPRCGVPDVAQFVLTEGNPRWEQTHLTYRIENYTPDLPRADVDHAIEKAFQLWSNVTPLTFTKVSEGQADIMISFVRGDHRDNSPFDGPGGNLAHAFQPGPGIGGDAHFDEDERWTNNFREYNLHRVAAHELGHSLGLSHSTDIGALMYPSYTFSGDQQLAQDDIDGIQAIYGRSQNPVQPIGPQTPKACDSKLTFDAITTIRGEVMFFKDRFYMRTNPFYPEVELNFISVFWPQLPNGLEAAYEFADRDEVRFFKGNKYWAVQGQNVLHGYPKDIYSSFGFPRTVKHIDAALSEENTGKTYFFVANKYWRYDEYKRSMDPGYPKMIAHDFPGIGHKVDAVFMKDGFFYFFHGTRQYKFDPKTKRILTLQKANSWFNCRKN

SEQ ID NO: 435 - protein, 450 aa, Artificial Sequence
  MMP-1 variant V227S
FPATLETQEQDVDLVQKYLEKYYNLKNDGRQVEKRRNSGPVVEKLKQMQEFFGLKVTGKPDAETLKVMKQPRCGVPDVAQFVLTEGNPRWEQTHLTYRIENYTPDLPRADVDHAIEKAFQLWSNVTPLTFTKVSEGQADIMISFVRGDHRDNSPFDGPGGNLAHAFQPGPGIGGDAHFDEDERWTNNFREYNLHRVAAHELGHSLGLSHSTDIGALMYPSYTFSGDSQLAQDDIDGIQAIYGRSQNPVQPIGPQTPKACDSKLTFDAITTIRGEVMFFKDRFYMRTNPFYPEVELNFISVFWPQLPNGLEAAYEFADRDEVRFFKGNKYWAVQGQNVLHGYPKDIYSSFGFPRTVKHIDAALSEENTGKTYFFVANKYWRYDEYKRSMDPGYPKMIAHDFPGIGHKVDAVFMKDGFFYFFHGTRQYKFDPKTKRILTLQKANSWFNCRKN

SEQ ID NO: 436 - protein, 450 aa, Artificial Sequence
  MMP-1 variant V227G
FPATLETQEQDVDLVQKYLEKYYNLKNDGRQVEKRRNSGPVVEKLKQMQEFFGLKVTGKPDAETLKVMKQPRCGVPDVAQFVLTEGNPRWEQTHLTYRIENYTPDLPRADVDHAIEKAFQLWSNVTPLTFTKVSEGQADIMISFVRGDHRDNSPFDGPGGNLAHAFQPGPGIGGDAHFDEDERWTNNFREYNLHRVAAHELGHSLGLSHSTDIGALMYPSYTFSGDGQLAQDDIDGIQAIYGRSQNPVQPIGPQTPKACDSKLTFDAITTIRGEVMFFKDRFYMRTNPFYPEVELNFISVFWPQLPNGLEAAYEFADRDEVRFFKGNKYWAVQGQNVLHGYPKDIYSSFGFPRTVKHIDAALSEENTGKTYFFVANKYWRYDEYKRSMDPGYPKMIAHDFPGIGHKVDAVFMKDGFFYFFHGTRQYKFDPKTKRILTLQKANSWFNCRKN

SEQ ID NO: 437 - protein, 450 aa, Artificial Sequence
  MMP-1 variant V227W
FPATLETQEQDVDLVQKYLEKYYNLKNDGRQVEKRRNSGPVVEKLKQMQEFFGLKVTGKPDAETLKVMKQPRCGVPDVAQFVLTEGNPRWEQTHLTYRIENYTPDLPRADVDHAIEKAFQLWSNVTPLTFTKVSEGQADIMISFVRGDHRDNSPFDGPGGNLAHAFQPGPGIGGDAHFDEDERWTNNFREYNLHRVAAHELGHSLGLSHSTDIGALMYPSYTFSGDWQLAQDDIDGIQAIYGRSQNPVQPIGPQTPKACDSKLTFDAITTIRGEVMFFKDRFYMRTNPFYPEVELNFISVFWPQLPNGLEAAYEFADRDEVRFFKGNKYWAVQGQNVLHGYPKDIYSSFGFPRTVKHIDAALSEENTGKTYFFVANKYWRYDEYKRSMDPGYPKMIAHDFPGIGHKVDAVFMKDGFFYFFHGTRQYKFDPKTKRILTLQKANSWFNCRKN

SEQ ID NO: 438 - protein, 450 aa, Artificial Sequence
  MMP-1 variant V227L
FPATLETQEQDVDLVQKYLEKYYNLKNDGRQVEKRRNSGPVVEKLKQMQEFFGLKVTGKPDAETLKVMKQPRCGVPDVAQFVLTEGNPRWEQTHLTYRIENYTPDLPRADVDHAIEKAFQLWSNVTPLTFTKVSEGQADIMISFVRGDHRDNSPFDGPGGNLAHAFQPGPGIGGDAHFDEDERWTNNFREYNLHRVAAHELGHSLGLSHSTDIGALMYPSYTFSGDLQLAQDDIDGIQAIYGRSQNPVQPIGPQTPKACDSKLTFDAITTIRGEVMFFKDRFYMRTNPFYPEVELNFISVFWPQLPNGLEAAYEFADRDEVRFFKGNKYWAVQGQNVLHGYPKDIYSSFGFPRTVKHIDAALSEENTGKTYFFVANKYWRYDEYKRSMDPGYPKMIAHDFPGIGHKVDAVFMKDGFFYFFHGTRQYKFDPKTKRILTLQKANSWFNCRKN

SEQ ID NO: 439 - protein, 450 aa, Artificial Sequence
  MMP-1 variant Q228P
FPATLETQEQDVDLVQKYLEKYYNLKNDGRQVEKRRNSGPVVEKLKQMQEFFGLKVTGKPDAETLKVMKQPRCGVPDVAQFVLTEGNPRWEQTHLTYRIENYTPDLPRADVDHAIEKAFQLWSNVTPLTFTKVSEGQADIMISFVRGDHRDNSPFDGPGGNLAHAFQPGPGIGGDAHFDEDERWTNNFREYNLHRVAAHELGHSLGLSHSTDIGALMYPSYTFSGDVPLAQDDIDGIQAIYGRSQNPVQPIGPQTPKACDSKLTFDAITTIRGEVMFFKDRFYMRTNPFYPEVELNFISVFWPQLPNGLEAAYEFADRDEVRFFKGNKYWAVQGQNVLHGYPKDIYSSFGFPRTVKHIDAALSEENTGKTYFFVANKYWRYDEYKRSMDPGYPKMIAHDFPGIGHKVDAVFMKDGFFYFFHGTRQYKFDPKTKRILTLQKANSWFNCRKN

SEQ ID NO: 440 - protein, 450 aa, Artificial Sequence
  MMP-1 variant L229T
FPATLETQEQDVDLVQKYLEKYYNLKNDGRQVEKRRNSGPVVEKLKQMQEFFGLKVTGKPDAETLKVMKQPRCGVPDVAQFVLTEGNPRWEQTHLTYRIENYTPDLPRADVDHAIEKAFQLWSNVTPLTFTKVSEGQADIMISFVRGDHRDNSPFDGPGGNLAHAFQPGPGIGGDAHFDEDERWTNNFREYNLHRVAAHELGHSLGLSHSTDIGALMYPSYTFSGDVQTAQDDIDGIQAIYGRSQNPVQPIGPQTPKACDSKLTFDAITTIRGEVMFFKDRFYMRTNPFYPEVELNFISVFWPQLPNGLEAAYEFADRDEVRFFKGNKYWAVQGQNVLHGYPKDIYSSFGFPRTVKHIDAALSEENTGKTYFFVANKYWRYDEYKRSMDPGYPKMIAHDFPGIGHKVDAVFMKDGFFYFFHGTRQYKFDPKTKRILTLQKANSWFNCRKN

SEQ ID NO: 441 - protein, 450 aa, Artificial Sequence
  MMP-1 variant L229I
FPATLETQEQDVDLVQKYLEKYYNLKNDGRQVEKRRNSGPVVEKLKQMQEFFGLKVTGKPDAETLKVMKQPRCGVPDVAQFVLTEGNPRWEQTHLTYRIENYTPDLPRADVDHAIEKAFQLWSNVTPLTFTKVSEGQADIMISFVRGDHRDNSPFDGPGGNLAHAFQPGPGIGGDAHFDEDERWTNNFREYNLHRVAAHELGHSLGLSHSTDIGALMYPSYTFSGDVQIAQDDIDGIQAIYGRSQNPVQPIGPQTPKACDSKLTFDAITTIRGEVMFFKDRFYMRTNPFYPEVELNFISVFWPQLPNGLEAAYEFADRDEVRFFKGNKYWAVQGQNVLHGYPKDIYSSFGFPRTVKHIDAALSEENTGKTYFFVANKYWRYDEYKRSMDPGYPKMIAHDFPGIGHKVDAVFMKDGFFYFFHGTRQYKFDPKTKRILTLQKANSWFNCRKN

SEQ ID NO: 442 - protein, 450 aa, Artificial Sequence
  MMP-1 variant L229A
FPATLETQEQDVDLVQKYLEKYYNLKNDGRQVEKRRNSGPVVEKLKQMQEFFGLKVTGKPDAETLKVMKQPRCGVPDVAQFVLTEGNPRWEQTHLTYRIENYTPDLPRADVDHAIEKAFQLWSNVTPLTFTKVSEGQADIMISFVRGDHRDNSPFDGPGGNLAHAFQPGPGIGGDAHFDEDERWTNNFREYNLHRVAAHELGHSLGLSHSTDIGALMYPSYTFSGDVQAAQDDIDGIQAIYGRSQNPVQPIGPQTPKACDSKLTFDAITTIRGEVMFFKDRFYMRTNPFYPEVELNFISVFWPQLPNGLEAAYEFADRDEVRFFKGNKYWAVQGQNVLHGYPKDIYSSFGFPRTVKHIDAALSEENTGKTYFFVANKYWRYDEYKRSMDPGYPKMIAHDFPGIGHKVDAVFMKDGFFYFFHGTRQYKFDPKTKRILTLQKANSWFNCRKN

SEQ ID NO: 443 - protein, 450 aa, Artificial Sequence
  MMP-1 variant D233E
FPATLETQEQDVDLVQKYLEKYYNLKNDGRQVEKRRNSGPVVEKLKQMQEFFGLKVTGKPDAETLKVMKQPRCGVPDVAQFVLTEGNPRWEQTHLTYRIENYTPDLPRADVDHAIEKAFQLWSNVTPLTFTKVSEGQADIMISFVRGDHRDNSPFDGPGGNLAHAFQPGPGIGGDAHFDEDERWTNNFREYNLHRVAAHELGHSLGLSHSTDIGALMYPSYTFSGDVQLAQDEIDGIQAIYGRSQNPVQPIGPQTPKACDSKLTFDAITTIRGEVMFFKDRFYMRTNPFYPEVELNFISVFWPQLPNGLEAAYEFADRDEVRFFKGNKYWAVQGQNVLHGYPKDIYSSFGFPRTVKHIDAALSEENTGKTYFFVANKYWRYDEYKRSMDPGYPKMIAHDFPGIGHKVDAVFMKDGFFYFFHGTRQYKFDPKTKRILTLQKANSWFNCRKN

SEQ ID NO: 444 - protein, 450 aa, Artificial Sequence
  MMP-1 variant I234E
FPATLETQEQDVDLVQKYLEKYYNLKNDGRQVEKRRNSGPVVEKLKQMQEFFGLKVTGKPDAETLKVMKQPRCGVPDVAQFVLTEGNPRWEQTHLTYRIENYTPDLPRADVDHAIEKAFQLWSNVTPLTFTKVSEGQADIMISFVRGDHRDNSPFDGPGGNLAHAFQPGPGIGGDAHFDEDERWTNNFREYNLHRVAAHELGHSLGLSHSTDIGALMYPSYTFSGDVQLAQDDEDGIQAIYGRSQNPVQPIGPQTPKACDSKLTFDAITTIRGEVMFFKDRFYMRTNPFYPEVELNFISVFWPQLPNGLEAAYEFADRDEVRFFKGNKYWAVQGQNVLHGYPKDIYSSFGFPRTVKHIDAALSEENTGKTYFFVANKYWRYDEYKRSMDPGYPKMIAHDFPGIGHKVDAVFMKDGFFYFFHGTRQYKFDPKTKRILTLQKANSWFNCRKN

SEQ ID NO: 445 - protein, 450 aa, Artificial Sequence
  MMP-1 variant I234Q
FPATLETQEQDVDLVQKYLEKYYNLKNDGRQVEKRRNSGPVVEKLKQMQEFFGLKVTGKPDAETLKVMKQPRCGVPDVAQFVLTEGNPRWEQTHLTYRIENYTPDLPRADVDHAIEKAFQLWSNVTPLTFTKVSEGQADIMISFVRGDHRDNSPFDGPGGNLAHAFQPGPGIGGDAHFDEDERWTNNFREYNLHRVAAHELGHSLGLSHSTDIGALMYPSYTFSGDVQLAQDDQDGIQAIYGRSQNPVQPIGPQTPKACDSKLTFDAITTIRGEVMFFKDRFYMRTNPFYPEVELNFISVFWPQLPNGLEAAYEFADRDEVRFFKGNKYWAVQGQNVLHGYPKDIYSSFGFPRTVKHIDAALSEENTGKTYFFVANKYWRYDEYKRSMDPGYPKMIAHDFPGIGHKVDAVFMKDGFFYFFHGTRQYKFDPKTKRILTLQKANSWFNCRKN

SEQ ID NO: 446 - protein, 450 aa, Artificial Sequence
  MMP-1 variant I234T
FPATLETQEQDVDLVQKYLEKYYNLKNDGRQVEKRRNSGPVVEKLKQMQEFFGLKVTGKPDAETLKVMKQPRCGVPDVAQFVLTEGNPRWEQTHLTYRIENYTPDLPRADVDHAIEKAFQLWSNVTPLTFTKVSEGQADIMISFVRGDHRDNSPFDGPGGNLAHAFQPGPGIGGDAHFDEDERWTNNFREYNLHRVAAHELGHSLGLSHSTDIGALMYPSYTFSGDVQLAQDDTDGIQAIYGRSQNPVQPIGPQTPKACDSKLTFDAITTIRGEVMFFKDRFYMRTNPFYPEVELNFISVFWPQLPNGLEAAYEFADRDEVRFFKGNKYWAVQGQNVLHGYPKDIYSSFGFPRTVKHIDAALSEENTGKTYFFVANKYWRYDEYKRSMDPGYPKMIAHDFPGIGHKVDAVFMKDGFFYFFHGTRQYKFDPKTKRILTLQKANSWFNCRKN

SEQ ID NO: 447 - protein, 450 aa, Artificial Sequence
  MMP-1 variant I234A
FPATLETQEQDVDLVQKYLEKYYNLKNDGRQVEKRRNSGPVVEKLKQMQEFFGLKVTGKPDAETLKVMKQPRCGVPDVAQFVLTEGNPRWEQTHLTYRIENYTPDLPRADVDHAIEKAFQLWSNVTPLTFTKVSEGQADIMISFVRGDHRDNSPFDGPGGNLAHAFQPGPGIGGDAHFDEDERWTNNFREYNLHRVAAHELGHSLGLSHSTDIGALMYPSYTFSGDVQLAQDDADGIQAIYGRSQNPVQPIGPQTPKACDSKLTFDAITTIRGEVMFFKDRFYMRTNPFYPEVELNFISVFWPQLPNGLEAAYEFADRDEVRFFKGNKYWAVQGQNVLHGYPKDIYSSFGFPRTVKHIDAALSEENTGKTYFFVANKYWRYDEYKRSMDPGYPKMIAHDFPGIGHKVDAVFMKDGFFYFFHGTRQYKFDPKTKRILTLQKANSWFNCRKN

SEQ ID NO: 448 - protein, 450 aa, Artificial Sequence
  MMP-1 variant I240C
FPATLETQEQDVDLVQKYLEKYYNLKNDGRQVEKRRNSGPVVEKLKQMQEFFGLKVTGKPDAETLKVMKQPRCGVPDVAQFVLTEGNPRWEQTHLTYRIENYTPDLPRADVDHAIEKAFQLWSNVTPLTFTKVSEGQADIMISFVRGDHRDNSPFDGPGGNLAHAFQPGPGIGGDAHFDEDERWTNNFREYNLHRVAAHELGHSLGLSHSTDIGALMYPSYTFSGDVQLAQDDIDGIQACYGRSQNPVQPIGPQTPKACDSKLTFDAITTIRGEVMFFKDRFYMRTNPFYPEVELNFISVFWPQLPNGLEAAYEFADRDEVRFFKGNKYWAVQGQNVLHGYPKDIYSSFGFPRTVKHIDAALSEENTGKTYFFVANKYWRYDEYKRSMDPGYPKMIAHDFPGIGHKVDAVFMKDGFFYFFHGTRQYKFDPKTKRILTLQKANSWFNCRKN

SEQ ID NO: 449 - protein, 450 aa, Artificial Sequence
  MMP-1 variant I240S
FPATLETQEQDVDLVQKYLEKYYNLKNDGRQVEKRRNSGPVVEKLKQMQEFFGLKVTGKPDAETLKVMKQPRCGVPDVAQFVLTEGNPRWEQTHLTYRIENYTPDLPRADVDHAIEKAFQLWSNVTPLTFTKVSEGQADIMISFVRGDHRDNSPFDGPGGNLAHAFQPGPGIGGDAHFDEDERWTNNFREYNLHRVAAHELGHSLGLSHSTDIGALMYPSYTFSGDVQLAQDDIDGIQASYGRSQNPVQPIGPQTPKACDSKLTFDAITTIRGEVMFFKDRFYMRTNPFYPEVELNFISVFWPQLPNGLEAAYEFADRDEVRFFKGNKYWAVQGQNVLHGYPKDIYSSFGFPRTVKHIDAALSEENTGKTYFFVANKYWRYDEYKRSMDPGYPKMIAHDFPGIGHKVDAVFMKDGFFYFFHGTRQYKFDPKTKRILTLQKANSWFNCRKN

SEQ ID NO: 450 - protein, 450 aa, Artificial Sequence
  MMP-1 variant I240A
FPATLETQEQDVDLVQKYLEKYYNLKNDGRQVEKRRNSGPVVEKLKQMQEFFGLKVTGKPDAETLKVMKQPRCGVPDVAQFVLTEGNPRWEQTHLTYRIENYTPDLPRADVDHAIEKAFQLWSNVTPLTFTKVSEGQADIMISFVRGDHRDNSPFDGPGGNLAHAFQPGPGIGGDAHFDEDERWTNNFREYNLHRVAAHELGHSLGLSHSTDIGALMYPSYTFSGDVQLAQDDIDGIQAAYGRSQNPVQPIGPQTPKACDSKLTFDAITTIRGEVMFFKDRFYMRTNPFYPEVELNFISVFWPQLPNGLEAAYEFADRDEVRFFKGNKYWAVQGQNVLHGYPKDIYSSFGFPRTVKHIDAALSEENTGKTYFFVANKYWRYDEYKRSMDPGYPKMIAHDFPGIGHKVDAVFMKDGFFYFFHGTRQYKFDPKTKRILTLQKANSWFNCRKN

SEQ ID NO: 451 - protein, 450 aa, Artificial Sequence
  MMP-1 variant E100R
FPATLETQEQDVDLVQKYLEKYYNLKNDGRQVEKRRNSGPVVEKLKQMQEFFGLKVTGKPDAETLKVMKQPRCGVPDVAQFVLTEGNPRWEQTHLTYRIRNYTPDLPRADVDHAIEKAFQLWSNVTPLTFTKVSEGQADIMISFVRGDHRDNSPFDGPGGNLAHAFQPGPGIGGDAHFDEDERWTNNFREYNLHRVAAHELGHSLGLSHSTDIGALMYPSYTFSGDVQLAQDDIDGIQAIYGRSQNPVQPIGPQTPKACDSKLTFDAITTIRGEVMFFKDRFYMRTNPFYPEVELNFISVFWPQLPNGLEAAYEFADRDEVRFFKGNKYWAVQGQNVLHGYPKDIYSSFGFPRTVKHIDAALSEENTGKTYFFVANKYWRYDEYKRSMDPGYPKMIAHDFPGIGHKVDAVFMKDGFFYFFHGTRQYKFDPKTKRILTLQKANSWFNCRKN

SEQ ID NO: 452 - protein, 450 aa, Artificial Sequence
  MMP-1 variant E100N
FPATLETQEQDVDLVQKYLEKYYNLKNDGRQVEKRRNSGPVVEKLKQMQEFFGLKVTGKPDAETLKVMKQPRCGVPDVAQFVLTEGNPRWEQTHLTYRINNYTPDLPRADVDHAIEKAFQLWSNVTPLTFTKVSEGQADIMISFVRGDHRDNSPFDGPGGNLAHAFQPGPGIGGDAHFDEDERWTNNFREYNLHRVAAHELGHSLGLSHSTDIGALMYPSYTFSGDVQLAQDDIDGIQAIYGRSQNPVQPIGPQTPKACDSKLTFDAITTIRGEVMFFKDRFYMRTNPFYPEVELNFISVFWPQLPNGLEAAYEFADRDEVRFFKGNKYWAVQGQNVLHGYPKDIYSSFGFPRTVKHIDAALSEENTGKTYFFVANKYWRYDEYKRSMDPGYPKMIAHDFPGIGHKVDAVFMKDGFFYFFHGTRQYKFDPKTKRILTLQKANSWFNCRKN

SEQ ID NO: 453 - protein, 450 aa, Artificial Sequence
  MMP-1 variant E100T
FPATLETQEQDVDLVQKYLEKYYNLKNDGRQVEKRRNSGPVVEKLKQMQEFFGLKVTGKPDAETLKVMKQPRCGVPDVAQFVLTEGNPRWEQTHLTYRITNYTPDLPRADVDHAIEKAFQLWSNVTPLTFTKVSEGQADIMISFVRGDHRDNSPFDGPGGNLAHAFQPGPGIGGDAHFDEDERWTNNFREYNLHRVAAHELGHSLGLSHSTDIGALMYPSYTFSGDVQLAQDDIDGIQAIYGRSQNPVQPIGPQTPKACDSKLTFDAITTIRGEVMFFKDRFYMRTNPFYPEVELNFISVFWPQLPNGLEAAYEFADRDEVRFFKGNKYWAVQGQNVLHGYPKDIYSSFGFPRTVKHIDAALSEENTGKTYFFVANKYWRYDEYKRSMDPGYPKMIAHDFPGIGHKVDAVFMKDGFFYFFHGTRQYKFDPKTKRILTLQKANSWFNCRKN

SEQ ID NO: 454 - protein, 450 aa, Artificial Sequence
  MMP-1 variant E100S
FPATLETQEQDVDLVQKYLEKYYNLKNDGRQVEKRRNSGPVVEKLKQMQEFFGLKVTGKPDAETLKVMKQPRCGVPDVAQFVLTEGNPRWEQTHLTYRISNYTPDLPRADVDHAIEKAFQLWSNVTPLTFTKVSEGQADIMISFVRGDHRDNSPFDGPGGNLAHAFQPGPGIGGDAHFDEDERWTNNFREYNLHRVAAHELGHSLGLSHSTDIGALMYPSYTFSGDVQLAQDDIDGIQAIYGRSQNPVQPIGPQTPKACDSKLTFDAITTIRGEVMFFKDRFYMRTNPFYPEVELNFISVFWPQLPNGLEAAYEFADRDEVRFFKGNKYWAVQGQNVLHGYPKDIYSSFGFPRTVKHIDAALSEENTGKTYFFVANKYWRYDEYKRSMDPGYPKMIAHDFPGIGHKVDAVFMKDGFFYFFHGTRQYKFDPKTKRILTLQKANSWFNCRKN

SEQ ID NO: 455 - protein, 450 aa, Artificial Sequence
  MMP-1 variant E100F
FPATLETQEQDVDLVQKYLEKYYNLKNDGRQVEKRRNSGPVVEKLKQMQEFFGLKVTGKPDAETLKVMKQPRCGVPDVAQFVLTEGNPRWEQTHLTYRIFNYTPDLPRADVDHAIEKAFQLWSNVTPLTFTKVSEGQADIMISFVRGDHRDNSPFDGPGGNLAHAFQPGPGIGGDAHFDEDERWTNNFREYNLHRVAAHELGHSLGLSHSTDIGALMYPSYTFSGDVQLAQDDIDGIQAIYGRSQNPVQPIGPQTPKACDSKLTFDAITTIRGEVMFFKDRFYMRTNPFYPEVELNFISVFWPQLPNGLEAAYEFADRDEVRFFKGNKYWAVQGQNVLHGYPKDIYSSFGFPRTVKHIDAALSEENTGKTYFFVANKYWRYDEYKRSMDPGYPKMIAHDFPGIGHKVDAVFMKDGFFYFFHGTRQYKFDPKTKRILTLQKANSWFNCRKN

SEQ ID NO: 456 - protein, 450 aa, Artificial Sequence
  MMP-1 variant E100I
FPATLETQEQDVDLVQKYLEKYYNLKNDGRQVEKRRNSGPVVEKLKQMQEFFGLKVTGKPDAETLKVMKQPRCGVPDVAQFVLTEGNPRWEQTHLTYRIINYTPDLPRADVDHAIEKAFQLWSNVTPLTFTKVSEGQADIMISFVRGDHRDNSPFDGPGGNLAHAFQPGPGIGGDAHFDEDERWTNNFREYNLHRVAAHELGHSLGLSHSTDIGALMYPSYTFSGDVQLAQDDIDGIQAIYGRSQNPVQPIGPQTPKACDSKLTFDAITTIRGEVMFFKDRFYMRTNPFYPEVELNFISVFWPQLPNGLEAAYEFADRDEVRFFKGNKYWAVQGQNVLHGYPKDIYSSFGFPRTVKHIDAALSEENTGKTYFFVANKYWRYDEYKRSMDPGYPKMIAHDFPGIGHKVDAVFMKDGFFYFFHGTRQYKFDPKTKRILTLQKANSWFNCRKN

SEQ ID NO: 457 - protein, 450 aa, Artificial Sequence
  MMP-1 variant E100V
FPATLETQEQDVDLVQKYLEKYYNLKNDGRQVEKRRNSGPVVEKLKQMQEFFGLKVTGKPDAETLKVMKQPRCGVPDVAQFVLTEGNPRWEQTHLTYRIVNYTPDLPRADVDHAIEKAFQLWSNVTPLTFTKVSEGQADIMISFVRGDHRDNSPFDGPGGNLAHAFQPGPGIGGDAHFDEDERWTNNFREYNLHRVAAHELGHSLGLSHSTDIGALMYPSYTFSGDVQLAQDDIDGIQAIYGRSQNPVQPIGPQTPKACDSKLTFDAITTIRGEVMFFKDRFYMRTNPFYPEVELNFISVFWPQLPNGLEAAYEFADRDEVRFFKGNKYWAVQGQNVLHGYPKDIYSSFGFPRTVKHIDAALSEENTGKTYFFVANKYWRYDEYKRSMDPGYPKMIAHDFPGIGHKVDAVFMKDGFFYFFHGTRQYKFDPKTKRILTLQKANSWFNCRKN

SEQ ID NO: 458 - protein, 450 aa, Artificial Sequence
  MMP-1 variant T103Y
FPATLETQEQDVDLVQKYLEKYYNLKNDGRQVEKRRNSGPVVEKLKQMQEFFGLKVTGKPDAETLKVMKQPRCGVPDVAQFVLTEGNPRWEQTHLTYRIENYYPDLPRADVDHAIEKAFQLWSNVTPLTFTKVSEGQADIMISFVRGDHRDNSPFDGPGGNLAHAFQPGPGIGGDAHFDEDERWTNNFREYNLHRVAAHELGHSLGLSHSTDIGALMYPSYTFSGDVQLAQDDIDGIQAIYGRSQNPVQPIGPQTPKACDSKLTFDAITTIRGEVMFFKDRFYMRTNPFYPEVELNFISVFWPQLPNGLEAAYEFADRDEVRFFKGNKYWAVQGQNVLHGYPKDIYSSFGFPRTVKHIDAALSEENTGKTYFFVANKYWRYDEYKRSMDPGYPKMIAHDFPGIGHKVDAVFMKDGFFYFFHGTRQYKFDPKTKRILTLQKANSWFNCRKN

SEQ ID NO: 459 - protein, 450 aa, Artificial Sequence
  MMP-1 variant S153T
FPATLETQEQDVDLVQKYLEKYYNLKNDGRQVEKRRNSGPVVEKLKQMQEFFGLKVTGKPDAETLKVMKQPRCGVPDVAQFVLTEGNPRWEQTHLTYRIENYTPDLPRADVDHAIEKAFQLWSNVTPLTFTKVSEGQADIMISFVRGDHRDNTPFDGPGGNLAHAFQPGPGIGGDAHFDEDERWTNNFREYNLHRVAAHELGHSLGLSHSTDIGALMYPSYTFSGDVQLAQDDIDGIQAIYGRSQNPVQPIGPQTPKACDSKLTFDAITTIRGEVMFFKDRFYMRTNPFYPEVELNFISVFWPQLPNGLEAAYEFADRDEVRFFKGNKYWAVQGQNVLHGYPKDIYSSFGFPRTVKHIDAALSEENTGKTYFFVANKYWRYDEYKRSMDPGYPKMIAHDFPGIGHKVDAVFMKDGFFYFFHGTRQYKFDPKTKRILTLQKANSWFNCRKN

SEQ ID NO: 460 - protein, 450 aa, Artificial Sequence
  MMP-1 variant G171D
FPATLETQEQDVDLVQKYLEKYYNLKNDGRQVEKRRNSGPVVEKLKQMQEFFGLKVTGKPDAETLKVMKQPRCGVPDVAQFVLTEGNPRWEQTHLTYRIENYTPDLPRADVDHAIEKAFQLWSNVTPLTFTKVSEGQADIMISFVRGDHRDNSPFDGPGGNLAHAFQPGPDIGGDAHFDEDERWTNNFREYNLHRVAAHELGHSLGLSHSTDIGALMYPSYTFSGDVQLAQDDIDGIQAIYGRSQNPVQPIGPQTPKACDSKLTFDAITTIRGEVMFFKDRFYMRTNPFYPEVELNFISVFWPQLPNGLEAAYEFADRDEVRFFKGNKYWAVQGQNVLHGYPKDIYSSFGFPRTVKHIDAALSEENTGKTYFFVANKYWRYDEYKRSMDPGYPKMIAHDFPGIGHKVDAVFMKDGFFYFFHGTRQYKFDPKTKRILTLQKANSWFNCRKN

SEQ ID NO: 461 - protein, 450 aa, Artificial Sequence
  MMP-1 variant G171E
FPATLETQEQDVDLVQKYLEKYYNLKNDGRQVEKRRNSGPVVEKLKQMQEFFGLKVTGKPDAETLKVMKQPRCGVPDVAQFVLTEGNPRWEQTHLTYRIENYTPDLPRADVDHAIEKAFQLWSNVTPLTFTKVSEGQADIMISFVRGDHRDNSPFDGPGGNLAHAFQPGPEIGGDAHFDEDERWTNNFREYNLHRVAAHELGHSLGLSHSTDIGALMYPSYTFSGDVQLAQDDIDGIQAIYGRSQNPVQPIGPQTPKACDSKLTFDAITTIRGEVMFFKDRFYMRTNPFYPEVELNFISVFWPQLPNGLEAAYEFADRDEVRFFKGNKYWAVQGQNVLHGYPKDIYSSFGFPRTVKHIDAALSEENTGKTYFFVANKYWRYDEYKRSMDPGYPKMIAHDFPGIGHKVDAVFMKDGFFYFFHGTRQYKFDPKTKRILTLQKANSWFNCRKN

SEQ ID NO: 462 - protein, 450 aa, Artificial Sequence
  MMP-1 variant G171P
FPATLETQEQDVDLVQKYLEKYYNLKNDGRQVEKRRNSGPVVEKLKQMQEFFGLKVTGKPDAETLKVMKQPRCGVPDVAQFVLTEGNPRWEQTHLTYRIENYTPDLPRADVDHAIEKAFQLWSNVTPLTFTKVSEGQADIMISFVRGDHRDNSPFDGPGGNLAHAFQPGPPIGGDAHFDEDERWTNNFREYNLHRVAAHELGHSLGLSHSTDIGALMYPSYTFSGDVQLAQDDIDGIQAIYGRSQNPVQPIGPQTPKACDSKLTFDAITTIRGEVMFFKDRFYMRTNPFYPEVELNFISVFWPQLPNGLEAAYEFADRDEVRFFKGNKYWAVQGQNVLHGYPKDIYSSFGFPRTVKHIDAALSEENTGKTYFFVANKYWRYDEYKRSMDPGYPKMIAHDFPGIGHKVDAVFMKDGFFYFFHGTRQYKFDPKTKRILTLQKANSWFNCRKN

SEQ ID NO: 463 - protein, 450 aa, Artificial Sequence
  MMP-1 variant E190D
FPATLETQEQDVDLVQKYLEKYYNLKNDGRQVEKRRNSGPVVEKLKQMQEFFGLKVTGKPDAETLKVMKQPRCGVPDVAQFVLTEGNPRWEQTHLTYRIENYTPDLPRADVDHAIEKAFQLWSNVTPLTFTKVSEGQADIMISFVRGDHRDNSPFDGPGGNLAHAFQPGPGIGGDAHFDEDERWTNNFRDYNLHRVAAHELGHSLGLSHSTDIGALMYPSYTFSGDVQLAQDDIDGIQAIYGRSQNPVQPIGPQTPKACDSKLTFDAITTIRGEVMFFKDRFYMRTNPFYPEVELNFISVFWPQLPNGLEAAYEFADRDEVRFFKGNKYWAVQGQNVLHGYPKDIYSSFGFPRTVKHIDAALSEENTGKTYFFVANKYWRYDEYKRSMDPGYPKMIAHDFPGIGHKVDAVFMKDGFFYFFHGTRQYKFDPKTKRILTLQKANSWFNCRKN

SEQ ID NO: 464 - protein, 450 aa, Artificial Sequence
  MMP-1 variant E190Y
FPATLETQEQDVDLVQKYLEKYYNLKNDGRQVEKRRNSGPVVEKLKQMQEFFGLKVTGKPDAETLKVMKQPRCGVPDVAQFVLTEGNPRWEQTHLTYRIENYTPDLPRADVDHAIEKAFQLWSNVTPLTFTKVSEGQADIMISFVRGDHRDNSPFDGPGGNLAHAFQPGPGIGGDAHFDEDERWTNNFRYYNLHRVAAHELGHSLGLSHSTDIGALMYPSYTFSGDVQLAQDDIDGIQAIYGRSQNPVQPIGPQTPKACDSKLTFDAITTIRGEVMFFKDRFYMRTNPFYPEVELNFISVFWPQLPNGLEAAYEFADRDEVRFFKGNKYWAVQGQNVLHGYPKDIYSSFGFPRTVKHIDAALSEENTGKTYFFVANKYWRYDEYKRSMDPGYPKMIAHDFPGIGHKVDAVFMKDGFFYFFHGTRQYKFDPKTKRILTLQKANSWFNCRKN

SEQ ID NO: 465 - protein, 450 aa, Artificial Sequence
  MMP-1 variant E190G
FPATLETQEQDVDLVQKYLEKYYNLKNDGRQVEKRRNSGPVVEKLKQMQEFFGLKVTGKPDAETLKVMKQPRCGVPDVAQFVLTEGNPRWEQTHLTYRIENYTPDLPRADVDHAIEKAFQLWSNVTPLTFTKVSEGQADIMISFVRGDHRDNSPFDGPGGNLAHAFQPGPGIGGDAHFDEDERWTNNFRGYNLHRVAAHELGHSLGLSHSTDIGALMYPSYTFSGDVQLAQDDIDGIQAIYGRSQNPVQPIGPQTPKACDSKLTFDAITTIRGEVMFFKDRFYMRTNPFYPEVELNFISVFWPQLPNGLEAAYEFADRDEVRFFKGNKYWAVQGQNVLHGYPKDIYSSFGFPRTVKHIDAALSEENTGKTYFFVANKYWRYDEYKRSMDPGYPKMIAHDFPGIGHKVDAVFMKDGFFYFFHGTRQYKFDPKTKRILTLQKANSWFNCRKN

SEQ ID NO: 466 - protein, 450 aa, Artificial Sequence
  MMP-1 variant Y191V
FPATLETQEQDVDLVQKYLEKYYNLKNDGRQVEKRRNSGPVVEKLKQMQEFFGLKVTGKPDAETLKVMKQPRCGVPDVAQFVLTEGNPRWEQTHLTYRIENYTPDLPRADVDHAIEKAFQLWSNVTPLTFTKVSEGQADIMISFVRGDHRDNSPFDGPGGNLAHAFQPGPGIGGDAHFDEDERWTNNFREVNLHRVAAHELGHSLGLSHSTDIGALMYPSYTFSGDVQLAQDDIDGIQAIYGRSQNPVQPIGPQTPKACDSKLTFDAITTIRGEVMFFKDRFYMRTNPFYPEVELNFISVFWPQLPNGLEAAYEFADRDEVRFFKGNKYWAVQGQNVLHGYPKDIYSSFGFPRTVKHIDAALSEENTGKTYFFVANKYWRYDEYKRSMDPGYPKMIAHDFPGIGHKVDAVFMKDGFFYFFHGTRQYKFDPKTKRILTLQKANSWFNCRKN

SEQ ID NO: 467 - protein, 450 aa, Artificial Sequence
  MMP-1 variant N192D
FPATLETQEQDVDLVQKYLEKYYNLKNDGRQVEKRRNSGPVVEKLKQMQEFFGLKVTGKPDAETLKVMKQPRCGVPDVAQFVLTEGNPRWEQTHLTYRIENYTPDLPRADVDHAIEKAFQLWSNVTPLTFTKVSEGQADIMISFVRGDHRDNSPFDGPGGNLAHAFQPGPGIGGDAHFDEDERWTNNFREYDLHRVAAHELGHSLGLSHSTDIGALMYPSYTFSGDVQLAQDDIDGIQAIYGRSQNPVQPIGPQTPKACDSKLTFDAITTIRGEVMFFKDRFYMRTNPFYPEVELNFISVFWPQLPNGLEAAYEFADRDEVRFFKGNKYWAVQGQNVLHGYPKDIYSSFGFPRTVKHIDAALSEENTGKTYFFVANKYWRYDEYKRSMDPGYPKMIAHDFPGIGHKVDAVFMKDGFFYFFHGTRQYKFDPKTKRILTLQKANSWFNCRKN

SEQ ID NO: 468 - protein, 450 aa, Artificial Sequence
  MMP-1 variant N192H
FPATLETQEQDVDLVQKYLEKYYNLKNDGRQVEKRRNSGPVVEKLKQMQEFFGLKVTGKPDAETLKVMKQPRCGVPDVAQFVLTEGNPRWEQTHLTYRIENYTPDLPRADVDHAIEKAFQLWSNVTPLTFTKVSEGQADIMISFVRGDHRDNSPFDGPGGNLAHAFQPGPGIGGDAHFDEDERWTNNFREYHLHRVAAHELGHSLGLSHSTDIGALMYPSYTFSGDVQLAQDDIDGIQAIYGRSQNPVQPIGPQTPKACDSKLTFDAITTIRGEVMFFKDRFYMRTNPFYPEVELNFISVFWPQLPNGLEAAYEFADRDEVRFFKGNKYWAVQGQNVLHGYPKDIYSSFGFPRTVKHIDAALSEENTGKTYFFVANKYWRYDEYKRSMDPGYPKMIAHDFPGIGHKVDAVFMKDGFFYFFHGTRQYKFDPKTKRILTLQKANSWFNCRKN

SEQ ID NO: 469 - protein, 450 aa, Artificial Sequence
  MMP-1 variant N192C
FPATLETQEQDVDLVQKYLEKYYNLKNDGRQVEKRRNSGPVVEKLKQMQEFFGLKVTGKPDAETLKVMKQPRCGVPDVAQFVLTEGNPRWEQTHLTYRIENYTPDLPRADVDHAIEKAFQLWSNVTPLTFTKVSEGQADIMISFVRGDHRDNSPFDGPGGNLAHAFQPGPGIGGDAHFDEDERWTNNFREYCLHRVAAHELGHSLGLSHSTDIGALMYPSYTFSGDVQLAQDDIDGIQAIYGRSQNPVQPIGPQTPKACDSKLTFDAITTIRGEVMFFKDRFYMRTNPFYPEVELNFISVFWPQLPNGLEAAYEFADRDEVRFFKGNKYWAVQGQNVLHGYPKDIYSSFGFPRTVKHIDAALSEENTGKTYFFVANKYWRYDEYKRSMDPGYPKMIAHDFPGIGHKVDAVFMKDGFFYFFHGTRQYKFDPKTKRILTLQKANSWFNCRKN

SEQ ID NO: 470 - protein, 450 aa, Artificial Sequence
  MMP-1 variant N192S
FPATLETQEQDVDLVQKYLEKYYNLKNDGRQVEKRRNSGPVVEKLKQMQEFFGLKVTGKPDAETLKVMKQPRCGVPDVAQFVLTEGNPRWEQTHLTYRIENYTPDLPRADVDHAIEKAFQLWSNVTPLTFTKVSEGQADIMISFVRGDHRDNSPFDGPGGNLAHAFQPGPGIGGDAHFDEDERWTNNFREYSLHRVAAHELGHSLGLSHSTDIGALMYPSYTFSGDVQLAQDDIDGIQAIYGRSQNPVQPIGPQTPKACDSKLTFDAITTIRGEVMFFKDRFYMRTNPFYPEVELNFISVFWPQLPNGLEAAYEFADRDEVRFFKGNKYWAVQGQNVLHGYPKDIYSSFGFPRTVKHIDAALSEENTGKTYFFVANKYWRYDEYKRSMDPGYPKMIAHDFPGIGHKVDAVFMKDGFFYFFHGTRQYKFDPKTKRILTLQKANSWFNCRKN

SEQ ID NO: 471 - protein, 450 aa, Artificial Sequence
  MMP-1 variant H194P
FPATLETQEQDVDLVQKYLEKYYNLKNDGRQVEKRRNSGPVVEKLKQMQEFFGLKVTGKPDAETLKVMKQPRCGVPDVAQFVLTEGNPRWEQTHLTYRIENYTPDLPRADVDHAIEKAFQLWSNVTPLTFTKVSEGQADIMISFVRGDHRDNSPFDGPGGNLAHAFQPGPGIGGDAHFDEDERWTNNFREYNLPRVAAHELGHSLGLSHSTDIGALMYPSYTFSGDVQLAQDDIDGIQAIYGRSQNPVQPIGPQTPKACDSKLTFDAITTIRGEVMFFKDRFYMRTNPFYPEVELNFISVFWPQLPNGLEAAYEFADRDEVRFFKGNKYWAVQGQNVLHGYPKDIYSSFGFPRTVKHIDAALSEENTGKTYFFVANKYWRYDEYKRSMDPGYPKMIAHDFPGIGHKVDAVFMKDGFFYFFHGTRQYKFDPKTKRILTLQKANSWFNCRKN

SEQ ID NO: 472 - protein, 450 aa, Artificial Sequence
  MMP-1 variant L207R
FPATLETQEQDVDLVQKYLEKYYNLKNDGRQVEKRRNSGPVVEKLKQMQEFFGLKVTGKPDAETLKVMKQPRCGVPDVAQFVLTEGNPRWEQTHLTYRIENYTPDLPRADVDHAIEKAFQLWSNVTPLTFTKVSEGQADIMISFVRGDHRDNSPFDGPGGNLAHAFQPGPGIGGDAHFDEDERWTNNFREYNLHRVAAHELGHSLGRSHSTDIGALMYPSYTFSGDVQLAQDDIDGIQAIYGRSQNPVQPIGPQTPKACDSKLTFDAITTIRGEVMFFKDRFYMRTNPFYPEVELNFISVFWPQLPNGLEAAYEFADRDEVRFFKGNKYWAVQGQNVLHGYPKDIYSSFGFPRTVKHIDAALSEENTGKTYFFVANKYWRYDEYKRSMDPGYPKMIAHDFPGIGHKVDAVFMKDGFFYFFHGTRQYKFDPKTKRILTLQKANSWFNCRKN

SEQ ID NO: 473 - protein, 450 aa, Artificial Sequence
  MMP-1 variant L207G
FPATLETQEQDVDLVQKYLEKYYNLKNDGRQVEKRRNSGPVVEKLKQMQEFFGLKVTGKPDAETLKVMKQPRCGVPDVAQFVLTEGNPRWEQTHLTYRIENYTPDLPRADVDHAIEKAFQLWSNVTPLTFTKVSEGQADIMISFVRGDHRDNSPFDGPGGNLAHAFQPGPGIGGDAHFDEDERWTNNFREYNLHRVAAHELGHSLGGSHSTDIGALMYPSYTFSGDVQLAQDDIDGIQAIYGRSQNPVQPIGPQTPKACDSKLTFDAITTIRGEVMFFKDRFYMRTNPFYPEVELNFISVFWPQLPNGLEAAYEFADRDEVRFFKGNKYWAVQGQNVLHGYPKDIYSSFGFPRTVKHIDAALSEENTGKTYFFVANKYWRYDEYKRSMDPGYPKMIAHDFPGIGHKVDAVFMKDGFFYFFHGTRQYKFDPKTKRILTLQKANSWFNCRKN

SEQ ID NO: 474 - protein, 450 aa, Artificial Sequence
  MMP-1 variant L207I
FPATLETQEQDVDLVQKYLEKYYNLKNDGRQVEKRRNSGPVVEKLKQMQEFFGLKVTGKPDAETLKVMKQPRCGVPDVAQFVLTEGNPRWEQTHLTYRIENYTPDLPRADVDHAIEKAFQLWSNVTPLTFTKVSEGQADIMISFVRGDHRDNSPFDGPGGNLAHAFQPGPGIGGDAHFDEDERWTNNFREYNLHRVAAHELGHSLGISHSTDIGALMYPSYTFSGDVQLAQDDIDGIQAIYGRSQNPVQPIGPQTPKACDSKLTFDAITTIRGEVMFFKDRFYMRTNPFYPEVELNFISVFWPQLPNGLEAAYEFADRDEVRFFKGNKYWAVQGQNVLHGYPKDIYSSFGFPRTVKHIDAALSEENTGKTYFFVANKYWRYDEYKRSMDPGYPKMIAHDFPGIGHKVDAVFMKDGFFYFFHGTRQYKFDPKTKRILTLQKANSWFNCRKN

SEQ ID NO: 475 - protein, 450 aa, Artificial Sequence
  MMP-1 variant L207V
FPATLETQEQDVDLVQKYLEKYYNLKNDGRQVEKRRNSGPVVEKLKQMQEFFGLKVTGKPDAETLKVMKQPRCGVPDVAQFVLTEGNPRWEQTHLTYRIENYTPDLPRADVDHAIEKAFQLWSNVTPLTFTKVSEGQADIMISFVRGDHRDNSPFDGPGGNLAHAFQPGPGIGGDAHFDEDERWTNNFREYNLHRVAAHELGHSLGVSHSTDIGALMYPSYTFSGDVQLAQDDIDGIQAIYGRSQNPVQPIGPQTPKACDSKLTFDAITTIRGEVMFFKDRFYMRTNPFYPEVELNFISVFWPQLPNGLEAAYEFADRDEVRFFKGNKYWAVQGQNVLHGYPKDIYSSFGFPRTVKHIDAALSEENTGKTYFFVANKYWRYDEYKRSMDPGYPKMIAHDFPGIGHKVDAVFMKDGFFYFFHGTRQYKFDPKTKRILTLQKANSWFNCRKN

SEQ ID NO: 476 - protein, 450 aa, Artificial Sequence
  MMP-1 variant D212H
FPATLETQEQDVDLVQKYLEKYYNLKNDGRQVEKRRNSGPVVEKLKQMQEFFGLKVTGKPDAETLKVMKQPRCGVPDVAQFVLTEGNPRWEQTHLTYRIENYTPDLPRADVDHAIEKAFQLWSNVTPLTFTKVSEGQADIMISFVRGDHRDNSPFDGPGGNLAHAFQPGPGIGGDAHFDEDERWTNNFREYNLHRVAAHELGHSLGLSHSTHIGALMYPSYTFSGDVQLAQDDIDGIQAIYGRSQNPVQPIGPQTPKACDSKLTFDAITTIRGEVMFFKDRFYMRTNPFYPEVELNFISVFWPQLPNGLEAAYEFADRDEVRFFKGNKYWAVQGQNVLHGYPKDIYSSFGFPRTVKHIDAALSEENTGKTYFFVANKYWRYDEYKRSMDPGYPKMIAHDFPGIGHKVDAVFMKDGFFYFFHGTRQYKFDPKTKRILTLQKANSWFNCRKN

SEQ ID NO: 477 - protein, 450 aa, Artificial Sequence
  MMP-1 variant D212G
FPATLETQEQDVDLVQKYLEKYYNLKNDGRQVEKRRNSGPVVEKLKQMQEFFGLKVTGKPDAETLKVMKQPRCGVPDVAQFVLTEGNPRWEQTHLTYRIENYTPDLPRADVDHAIEKAFQLWSNVTPLTFTKVSEGQADIMISFVRGDHRDNSPFDGPGGNLAHAFQPGPGIGGDAHFDEDERWTNNFREYNLHRVAAHELGHSLGLSHSTGIGALMYPSYTFSGDVQLAQDDIDGIQAIYGRSQNPVQPIGPQTPKACDSKLTFDAITTIRGEVMFFKDRFYMRTNPFYPEVELNFISVFWPQLPNGLEAAYEFADRDEVRFFKGNKYWAVQGQNVLHGYPKDIYSSFGFPRTVKHIDAALSEENTGKTYFFVANKYWRYDEYKRSMDPGYPKMIAHDFPGIGHKVDAVFMKDGFFYFFHGTRQYKFDPKTKRILTLQKANSWFNCRKN

SEQ ID NO: 478 - protein, 450 aa, Artificial Sequence
  MMP-1 variant A230V
FPATLETQEQDVDLVQKYLEKYYNLKNDGRQVEKRRNSGPVVEKLKQMQEFFGLKVTGKPDAETLKVMKQPRCGVPDVAQFVLTEGNPRWEQTHLTYRIENYTPDLPRADVDHAIEKAFQLWSNVTPLTFTKVSEGQADIMISFVRGDHRDNSPFDGPGGNLAHAFQPGPGIGGDAHFDEDERWTNNFREYNLHRVAAHELGHSLGLSHSTDIGALMYPSYTFSGDVQLVQDDIDGIQAIYGRSQNPVQPIGPQTPKACDSKLTFDAITTIRGEVMFFKDRFYMRTNPFYPEVELNFISVFWPQLPNGLEAAYEFADRDEVRFFKGNKYWAVQGQNVLHGYPKDIYSSFGFPRTVKHIDAALSEENTGKTYFFVANKYWRYDEYKRSMDPGYPKMIAHDFPGIGHKVDAVFMKDGFFYFFHGTRQYKFDPKTKRILTLQKANSWFNCRKN

SEQ ID NO: 479 - protein, 450 aa, Artificial Sequence
  MMP-1 variant T84F
FPATLETQEQDVDLVQKYLEKYYNLKNDGRQVEKRRNSGPVVEKLKQMQEFFGLKVTGKPDAETLKVMKQPRCGVPDVAQFVLFEGNPRWEQTHLTYRIENYTPDLPRADVDHAIEKAFQLWSNVTPLTFTKVSEGQADIMISFVRGDHRDNSPFDGPGGNLAHAFQPGPGIGGDAHFDEDERWTNNFREYNLHRVAAHELGHSLGLSHSTDIGALMYPSYTFSGDVQLAQDDIDGIQAIYGRSQNPVQPIGPQTPKACDSKLTFDAITTIRGEVMFFKDRFYMRTNPFYPEVELNFISVFWPQLPNGLEAAYEFADRDEVRFFKGNKYWAVQGQNVLHGYPKDIYSSFGFPRTVKHIDAALSEENTGKTYFFVANKYWRYDEYKRSMDPGYPKMIAHDFPGIGHKVDAVFMKDGFFYFFHGTRQYKFDPKTKRILTLQKANSWFNCRKN

SEQ ID NO: 480 - protein, 450 aa, Artificial Sequence
  MMP-1 variant E85F
FPATLETQEQDVDLVQKYLEKYYNLKNDGRQVEKRRNSGPVVEKLKQMQEFFGLKVTGKPDAETLKVMKQPRCGVPDVAQFVLTFGNPRWEQTHLTYRIENYTPDLPRADVDHAIEKAFQLWSNVTPLTFTKVSEGQADIMISFVRGDHRDNSPFDGPGGNLAHAFQPGPGIGGDAHFDEDERWTNNFREYNLHRVAAHELGHSLGLSHSTDIGALMYPSYTFSGDVQLAQDDIDGIQAIYGRSQNPVQPIGPQTPKACDSKLTFDAITTIRGEVMFFKDRFYMRTNPFYPEVELNFISVFWPQLPNGLEAAYEFADRDEVRFFKGNKYWAVQGQNVLHGYPKDIYSSFGFPRTVKHIDAALSEENTGKTYFFVANKYWRYDEYKRSMDPGYPKMIAHDFPGIGHKVDAVFMKDGFFYFFHGTRQYKFDPKTKRILTLQKANSWFNCRKN

SEQ ID NO: 481 - protein, 450 aa, Artificial Sequence
  MMP-1 variant R98D
FPATLETQEQDVDLVQKYLEKYYNLKNDGRQVEKRRNSGPVVEKLKQMQEFFGLKVTGKPDAETLKVMKQPRCGVPDVAQFVLTEGNPRWEQTHLTYDIENYTPDLPRADVDHAIEKAFQLWSNVTPLTFTKVSEGQADIMISFVRGDHRDNSPFDGPGGNLAHAFQPGPGIGGDAHFDEDERWTNNFREYNLHRVAAHELGHSLGLSHSTDIGALMYPSYTFSGDVQLAQDDIDGIQAIYGRSQNPVQPIGPQTPKACDSKLTFDAITTIRGEVMFFKDRFYMRTNPFYPEVELNFISVFWPQLPNGLEAAYEFADRDEVRFFKGNKYWAVQGQNVLHGYPKDIYSSFGFPRTVKHIDAALSEENTGKTYFFVANKYWRYDEYKRSMDPGYPKMIAHDFPGIGHKVDAVFMKDGFFYFFHGTRQYKFDPKTKRILTLQKANSWFNCRKN

SEQ ID NO: 482 - protein, 450 aa, Artificial Sequence
  MMP-1 variant I99Q
FPATLETQEQDVDLVQKYLEKYYNLKNDGRQVEKRRNSGPVVEKLKQMQEFFGLKVTGKPDAETLKVMKQPRCGVPDVAQFVLTEGNPRWEQTHLTYRQENYTPDLPRADVDHAIEKAFQLWSNVTPLTFTKVSEGQADIMISFVRGDHRDNSPFDGPGGNLAHAFQPGPGIGGDAHFDEDERWTNNFREYNLHRVAAHELGHSLGLSHSTDIGALMYPSYTFSGDVQLAQDDIDGIQAIYGRSQNPVQPIGPQTPKACDSKLTFDAITTIRGEVMFFKDRFYMRTNPFYPEVELNFISVFWPQLPNGLEAAYEFADRDEVRFFKGNKYWAVQGQNVLHGYPKDIYSSFGFPRTVKHIDAALSEENTGKTYFFVANKYWRYDEYKRSMDPGYPKMIAHDFPGIGHKVDAVFMKDGFFYFFHGTRQYKFDPKTKRILTLQKANSWFNCRKN

SEQ ID NO: 483 - protein, 450 aa, Artificial Sequence
  MMP-1 variant P104M
FPATLETQEQDVDLVQKYLEKYYNLKNDGRQVEKRRNSGPVVEKLKQMQEFFGLKVTGKPDAETLKVMKQPRCGVPDVAQFVLTEGNPRWEQTHLTYRIENYTMDLPRADVDHAIEKAFQLWSNVTPLTFTKVSEGQADIMISFVRGDHRDNSPFDGPGGNLAHAFQPGPGIGGDAHFDEDERWTNNFREYNLHRVAAHELGHSLGLSHSTDIGALMYPSYTFSGDVQLAQDDIDGIQAIYGRSQNPVQPIGPQTPKACDSKLTFDAITTIRGEVMFFKDRFYMRTNPFYPEVELNFISVFWPQLPNGLEAAYEFADRDEVRFFKGNKYWAVQGQNVLHGYPKDIYSSFGFPRTVKHIDAALSEENTGKTYFFVANKYWRYDEYKRSMDPGYPKMIAHDFPGIGHKVDAVFMKDGFFYFFHGTRQYKFDPKTKRILTLQKANSWFNCRKN

SEQ ID NO: 484 - protein, 450 aa, Artificial Sequence
  MMP-1 variant P104A
FPATLETQEQDVDLVQKYLEKYYNLKNDGRQVEKRRNSGPVVEKLKQMQEFFGLKVTGKPDAETLKVMKQPRCGVPDVAQFVLTEGNPRWEQTHLTYRIENYTADLPRADVDHAIEKAFQLWSNVTPLTFTKVSEGQADIMISFVRGDHRDNSPFDGPGGNLAHAFQPGPGIGGDAHFDEDERWTNNFREYNLHRVAAHELGHSLGLSHSTDIGALMYPSYTFSGDVQLAQDDIDGIQAIYGRSQNPVQPIGPQTPKACDSKLTFDAITTIRGEVMFFKDRFYMRTNPFYPEVELNFISVFWPQLPNGLEAAYEFADRDEVRFFKGNKYWAVQGQNVLHGYPKDIYSSFGFPRTVKHIDAALSEENTGKTYFFVANKYWRYDEYKRSMDPGYPKMIAHDFPGIGHKVDAVFMKDGFFYFFHGTRQYKFDPKTKRILTLQKANSWFNCRKN

SEQ ID NO: 485 - protein, 450 aa, Artificial Sequence
  MMP-1 variant L106C
FPATLETQEQDVDLVQKYLEKYYNLKNDGRQVEKRRNSGPVVEKLKQMQEFFGLKVTGKPDAETLKVMKQPRCGVPDVAQFVLTEGNPRWEQTHLTYRIENYTPDCPRADVDHAIEKAFQLWSNVTPLTFTKVSEGQADIMISFVRGDHRDNSPFDGPGGNLAHAFQPGPGIGGDAHFDEDERWTNNFREYNLHRVAAHELGHSLGLSHSTDIGALMYPSYTFSGDVQLAQDDIDGIQAIYGRSQNPVQPIGPQTPKACDSKLTFDAITTIRGEVMFFKDRFYMRTNPFYPEVELNFISVFWPQLPNGLEAAYEFADRDEVRFFKGNKYWAVQGQNVLHGYPKDIYSSFGFPRTVKHIDAALSEENTGKTYFFVANKYWRYDEYKRSMDPGYPKMIAHDFPGIGHKVDAVFMKDGFFYFFHGTRQYKFDPKTKRILTLQKANSWFNCRKN

SEQ ID NO: 486 - protein, 450 aa, Artificial Sequence
  MMP-1 variant L106S
FPATLETQEQDVDLVQKYLEKYYNLKNDGRQVEKRRNSGPVVEKLKQMQEFFGLKVTGKPDAETLKVMKQPRCGVPDVAQFVLTEGNPRWEQTHLTYRIENYTPDSPRADVDHAIEKAFQLWSNVTPLTFTKVSEGQADIMISFVRGDHRDNSPFDGPGGNLAHAFQPGPGIGGDAHFDEDERWTNNFREYNLHRVAAHELGHSLGLSHSTDIGALMYPSYTFSGDVQLAQDDIDGIQAIYGRSQNPVQPIGPQTPKACDSKLTFDAITTIRGEVMFFKDRFYMRTNPFYPEVELNFISVFWPQLPNGLEAAYEFADRDEVRFFKGNKYWAVQGQNVLHGYPKDIYSSFGFPRTVKHIDAALSEENTGKTYFFVANKYWRYDEYKRSMDPGYPKMIAHDFPGIGHKVDAVFMKDGFFYFFHGTRQYKFDPKTKRILTLQKANSWFNCRKN

SEQ ID NO: 487 - protein, 450 aa, Artificial Sequence
  MMP-1 variant A109H
FPATLETQEQDVDLVQKYLEKYYNLKNDGRQVEKRRNSGPVVEKLKQMQEFFGLKVTGKPDAETLKVMKQPRCGVPDVAQFVLTEGNPRWEQTHLTYRIENYTPDLPRHDVDHAIEKAFQLWSNVTPLTFTKVSEGQADIMISFVRGDHRDNSPFDGPGGNLAHAFQPGPGIGGDAHFDEDERWTNNFREYNLHRVAAHELGHSLGLSHSTDIGALMYPSYTFSGDVQLAQDDIDGIQAIYGRSQNPVQPIGPQTPKACDSKLTFDAITTIRGEVMFFKDRFYMRTNPFYPEVELNFISVFWPQLPNGLEAAYEFADRDEVRFFKGNKYWAVQGQNVLHGYPKDIYSSFGFPRTVKHIDAALSEENTGKTYFFVANKYWRYDEYKRSMDPGYPKMIAHDFPGIGHKVDAVFMKDGFFYFFHGTRQYKFDPKTKRILTLQKANSWFNCRKN

SEQ ID NO: 488 - protein, 450 aa, Artificial Sequence
  MMP-1 variant D110A
FPATLETQEQDVDLVQKYLEKYYNLKNDGRQVEKRRNSGPVVEKLKQMQEFFGLKVTGKPDAETLKVMKQPRCGVPDVAQFVLTEGNPRWEQTHLTYRIENYTPDLPRAAVDHAIEKAFQLWSNVTPLTFTKVSEGQADIMISFVRGDHRDNSPFDGPGGNLAHAFQPGPGIGGDAHFDEDERWTNNFREYNLHRVAAHELGHSLGLSHSTDIGALMYPSYTFSGDVQLAQDDIDGIQAIYGRSQNPVQPIGPQTPKACDSKLTFDAITTIRGEVMFFKDRFYMRTNPFYPEVELNFISVFWPQLPNGLEAAYEFADRDEVRFFKGNKYWAVQGQNVLHGYPKDIYSSFGFPRTVKHIDAALSEENTGKTYFFVANKYWRYDEYKRSMDPGYPKMIAHDFPGIGHKVDAVFMKDGFFYFFHGTRQYKFDPKTKRILTLQKANSWFNCRKN

SEQ ID NO: 489 - protein, 450 aa, Artificial Sequence
  MMP-1 variant V111R
FPATLETQEQDVDLVQKYLEKYYNLKNDGRQVEKRRNSGPVVEKLKQMQEFFGLKVTGKPDAETLKVMKQPRCGVPDVAQFVLTEGNPRWEQTHLTYRIENYTPDLPRADRDHAIEKAFQLWSNVTPLTFTKVSEGQADIMISFVRGDHRDNSPFDGPGGNLAHAFQPGPGIGGDAHFDEDERWTNNFREYNLHRVAAHELGHSLGLSHSTDIGALMYPSYTFSGDVQLAQDDIDGIQAIYGRSQNPVQPIGPQTPKACDSKLTFDAITTIRGEVMFFKDRFYMRTNPFYPEVELNFISVFWPQLPNGLEAAYEFADRDEVRFFKGNKYWAVQGQNVLHGYPKDIYSSFGFPRTVKHIDAALSEENTGKTYFFVANKYWRYDEYKRSMDPGYPKMIAHDFPGIGHKVDAVFMKDGFFYFFHGTRQYKFDPKTKRILTLQKANSWFNCRKN

SEQ ID NO: 490 - protein, 450 aa, Artificial Sequence
  MMP-1 variant D112S
FPATLETQEQDVDLVQKYLEKYYNLKNDGRQVEKRRNSGPVVEKLKQMQEFFGLKVTGKPDAETLKVMKQPRCGVPDVAQFVLTEGNPRWEQTHLTYRIENYTPDLPRADVSHAIEKAFQLWSNVTPLTFTKVSEGQADIMISFVRGDHRDNSPFDGPGGNLAHAFQPGPGIGGDAHFDEDERWTNNFREYNLHRVAAHELGHSLGLSHSTDIGALMYPSYTFSGDVQLAQDDIDGIQAIYGRSQNPVQPIGPQTPKACDSKLTFDAITTIRGEVMFFKDRFYMRTNPFYPEVELNFISVFWPQLPNGLEAAYEFADRDEVRFFKGNKYWAVQGQNVLHGYPKDIYSSFGFPRTVKHIDAALSEENTGKTYFFVANKYWRYDEYKRSMDPGYPKMIAHDFPGIGHKVDAVFMKDGFFYFFHGTRQYKFDPKTKRILTLQKANSWFNCRKN

SEQ ID NO: 491 - protein, 450 aa, Artificial Sequence
  MMP-1 variant A118T
FPATLETQEQDVDLVQKYLEKYYNLKNDGRQVEKRRNSGPVVEKLKQMQEFFGLKVTGKPDAETLKVMKQPRCGVPDVAQFVLTEGNPRWEQTHLTYRIENYTPDLPRADVDHAIEKTFQLWSNVTPLTFTKVSEGQADIMISFVRGDHRDNSPFDGPGGNLAHAFQPGPGIGGDAHFDEDERWTNNFREYNLHRVAAHELGHSLGLSHSTDIGALMYPSYTFSGDVQLAQDDIDGIQAIYGRSQNPVQPIGPQTPKACDSKLTFDAITTIRGEVMFFKDRFYMRTNPFYPEVELNFISVFWPQLPNGLEAAYEFADRDEVRFFKGNKYWAVQGQNVLHGYPKDIYSSFGFPRTVKHIDAALSEENTGKTYFFVANKYWRYDEYKRSMDPGYPKMIAHDFPGIGHKVDAVFMKDGFFYFFHGTRQYKFDPKTKRILTLQKANSWFNCRKN

SEQ ID NO: 492 - protein, 450 aa, Artificial Sequence
  MMP-1 variant S123V
FPATLETQEQDVDLVQKYLEKYYNLKNDGRQVEKRRNSGPVVEKLKQMQEFFGLKVTGKPDAETLKVMKQPRCGVPDVAQFVLTEGNPRWEQTHLTYRIENYTPDLPRADVDHAIEKAFQLWVNVTPLTFTKVSEGQADIMISFVRGDHRDNSPFDGPGGNLAHAFQPGPGIGGDAHFDEDERWTNNFREYNLHRVAAHELGHSLGLSHSTDIGALMYPSYTFSGDVQLAQDDIDGIQAIYGRSQNPVQPIGPQTPKACDSKLTFDAITTIRGEVMFFKDRFYMRTNPFYPEVELNFISVFWPQLPNGLEAAYEFADRDEVRFFKGNKYWAVQGQNVLHGYPKDIYSSFGFPRTVKHIDAALSEENTGKTYFFVANKYWRYDEYKRSMDPGYPKMIAHDFPGIGHKVDAVFMKDGFFYFFHGTRQYKFDPKTKRILTLQKANSWFNCRKN

SEQ ID NO: 493 - protein, 450 aa, Artificial Sequence
  MMP-1 variant N124D
FPATLETQEQDVDLVQKYLEKYYNLKNDGRQVEKRRNSGPVVEKLKQMQEFFGLKVTGKPDAETLKVMKQPRCGVPDVAQFVLTEGNPRWEQTHLTYRIENYTPDLPRADVDHAIEKAFQLWSDVTPLTFTKVSEGQADIMISFVRGDHRDNSPFDGPGGNLAHAFQPGPGIGGDAHFDEDERWTNNFREYNLHRVAAHELGHSLGLSHSTDIGALMYPSYTFSGDVQLAQDDIDGIQAIYGRSQNPVQPIGPQTPKACDSKLTFDAITTIRGEVMFFKDRFYMRTNPFYPEVELNFISVFWPQLPNGLEAAYEFADRDEVRFFKGNKYWAVQGQNVLHGYPKDIYSSFGFPRTVKHIDAALSEENTGKTYFFVANKYWRYDEYKRSMDPGYPKMIAHDFPGIGHKVDAVFMKDGFFYFFHGTRQYKFDPKTKRILTLQKANSWFNCRKN

SEQ ID NO: 494 - protein, 450 aa, Artificial Sequence
  MMP-1 variant T126S
FPATLETQEQDVDLVQKYLEKYYNLKNDGRQVEKRRNSGPVVEKLKQMQEFFGLKVTGKPDAETLKVMKQPRCGVPDVAQFVLTEGNPRWEQTHLTYRIENYTPDLPRADVDHAIEKAFQLWSNVSPLTFTKVSEGQADIMISFVRGDHRDNSPFDGPGGNLAHAFQPGPGIGGDAHFDEDERWTNNFREYNLHRVAAHELGHSLGLSHSTDIGALMYPSYTFSGDVQLAQDDIDGIQAIYGRSQNPVQPIGPQTPKACDSKLTFDAITTIRGEVMFFKDRFYMRTNPFYPEVELNFISVFWPQLPNGLEAAYEFADRDEVRFFKGNKYWAVQGQNVLHGYPKDIYSSFGFPRTVKHIDAALSEENTGKTYFFVANKYWRYDEYKRSMDPGYPKMIAHDFPGIGHKVDAVFMKDGFFYFFHGTRQYKFDPKTKRILTLQKANSWFNCRKN

SEQ ID NO: 495 - protein, 450 aa, Artificial Sequence
  MMP-1 variant G147P
FPATLETQEQDVDLVQKYLEKYYNLKNDGRQVEKRRNSGPVVEKLKQMQEFFGLKVTGKPDAETLKVMKQPRCGVPDVAQFVLTEGNPRWEQTHLTYRIENYTPDLPRADVDHAIEKAFQLWSNVTPLTFTKVSEGQADIMISFVRPDHRDNSPFDGPGGNLAHAFQPGPGIGGDAHFDEDERWTNNFREYNLHRVAAHELGHSLGLSHSTDIGALMYPSYTFSGDVQLAQDDIDGIQAIYGRSQNPVQPIGPQTPKACDSKLTFDAITTIRGEVMFFKDRFYMRTNPFYPEVELNFISVFWPQLPNGLEAAYEFADRDEVRFFKGNKYWAVQGQNVLHGYPKDIYSSFGFPRTVKHIDAALSEENTGKTYFFVANKYWRYDEYKRSMDPGYPKMIAHDFPGIGHKVDAVFMKDGFFYFFHGTRQYKFDPKTKRILTLQKANSWFNCRKN

SEQ ID NO: 496 - protein, 450 aa, Artificial Sequence
  MMP-1 variant N152S
FPATLETQEQDVDLVQKYLEKYYNLKNDGRQVEKRRNSGPVVEKLKQMQEFFGLKVTGKPDAETLKVMKQPRCGVPDVAQFVLTEGNPRWEQTHLTYRIENYTPDLPRADVDHAIEKAFQLWSNVTPLTFTKVSEGQADIMISFVRGDHRDSSPFDGPGGNLAHAFQPGPGIGGDAHFDEDERWTNNFREYNLHRVAAHELGHSLGLSHSTDIGALMYPSYTFSGDVQLAQDDIDGIQAIYGRSQNPVQPIGPQTPKACDSKLTFDAITTIRGEVMFFKDRFYMRTNPFYPEVELNFISVFWPQLPNGLEAAYEFADRDEVRFFKGNKYWAVQGQNVLHGYPKDIYSSFGFPRTVKHIDAALSEENTGKTYFFVANKYWRYDEYKRSMDPGYPKMIAHDFPGIGHKVDAVFMKDGFFYFFHGTRQYKFDPKTKRILTLQKANSWFNCRKN

SEQ ID NO: 497 - protein, 450 aa, Artificial Sequence
  MMP-1 variant N152A
FPATLETQEQDVDLVQKYLEKYYNLKNDGRQVEKRRNSGPVVEKLKQMQEFFGLKVTGKPDAETLKVMKQPRCGVPDVAQFVLTEGNPRWEQTHLTYRIENYTPDLPRADVDHAIEKAFQLWSNVTPLTFTKVSEGQADIMISFVRGDHRDASPFDGPGGNLAHAFQPGPGIGGDAHFDEDERWTNNFREYNLHRVAAHELGHSLGLSHSTDIGALMYPSYTFSGDVQLAQDDIDGIQAIYGRSQNPVQPIGPQTPKACDSKLTFDAITTIRGEVMFFKDRFYMRTNPFYPEVELNFISVFWPQLPNGLEAAYEFADRDEVRFFKGNKYWAVQGQNVLHGYPKDIYSSFGFPRTVKHIDAALSEENTGKTYFFVANKYWRYDEYKRSMDPGYPKMIAHDFPGIGHKVDAVFMKDGFFYFFHGTRQYKFDPKTKRILTLQKANSWFNCRKN

SEQ ID NO: 498 - protein, 450 aa, Artificial Sequence
  MMP-1 variant P158K
FPATLETQEQDVDLVQKYLEKYYNLKNDGRQVEKRRNSGPVVEKLKQMQEFFGLKVTGKPDAETLKVMKQPRCGVPDVAQFVLTEGNPRWEQTHLTYRIENYTPDLPRADVDHAIEKAFQLWSNVTPLTFTKVSEGQADIMISFVRGDHRDNSPFDGKGGNLAHAFQPGPGIGGDAHFDEDERWTNNFREYNLHRVAAHELGHSLGLSHSTDIGALMYPSYTFSGDVQLAQDDIDGIQAIYGRSQNPVQPIGPQTPKACDSKLTFDAITTIRGEVMFFKDRFYMRTNPFYPEVELNFISVFWPQLPNGLEAAYEFADRDEVRFFKGNKYWAVQGQNVLHGYPKDIYSSFGFPRTVKHIDAALSEENTGKTYFFVANKYWRYDEYKRSMDPGYPKMIAHDFPGIGHKVDAVFMKDGFFYFFHGTRQYKFDPKTKRILTLQKANSWFNCRKN

SEQ ID NO: 499 - protein, 450 aa, Artificial Sequence
  MMP-1 variant P158N
FPATLETQEQDVDLVQKYLEKYYNLKNDGRQVEKRRNSGPVVEKLKQMQEFFGLKVTGKPDAETLKVMKQPRCGVPDVAQFVLTEGNPRWEQTHLTYRIENYTPDLPRADVDHAIEKAFQLWSNVTPLTFTKVSEGQADIMISFVRGDHRDNSPFDGNGGNLAHAFQPGPGIGGDAHFDEDERWTNNFREYNLHRVAAHELGHSLGLSHSTDIGALMYPSYTFSGDVQLAQDDIDGIQAIYGRSQNPVQPIGPQTPKACDSKLTFDAITTIRGEVMFFKDRFYMRTNPFYPEVELNFISVFWPQLPNGLEAAYEFADRDEVRFFKGNKYWAVQGQNVLHGYPKDIYSSFGFPRTVKHIDAALSEENTGKTYFFVANKYWRYDEYKRSMDPGYPKMIAHDFPGIGHKVDAVFMKDGFFYFFHGTRQYKFDPKTKRILTLQKANSWFNCRKN

SEQ ID NO: 500 - protein, 450 aa, Artificial Sequence
  MMP-1 variant P158T
FPATLETQEQDVDLVQKYLEKYYNLKNDGRQVEKRRNSGPVVEKLKQMQEFFGLKVTGKPDAETLKVMKQPRCGVPDVAQFVLTEGNPRWEQTHLTYRIENYTPDLPRADVDHAIEKAFQLWSNVTPLTFTKVSEGQADIMISFVRGDHRDNSPFDGTGGNLAHAFQPGPGIGGDAHFDEDERWTNNFREYNLHRVAAHELGHSLGLSHSTDIGALMYPSYTFSGDVQLAQDDIDGIQAIYGRSQNPVQPIGPQTPKACDSKLTFDAITTIRGEVMFFKDRFYMRTNPFYPEVELNFISVFWPQLPNGLEAAYEFADRDEVRFFKGNKYWAVQGQNVLHGYPKDIYSSFGFPRTVKHIDAALSEENTGKTYFFVANKYWRYDEYKRSMDPGYPKMIAHDFPGIGHKVDAVFMKDGFFYFFHGTRQYKFDPKTKRILTLQKANSWFNCRKN

SEQ ID NO: 501 - protein, 450 aa, Artificial Sequence
  MMP-1 variant P158G
FPATLETQEQDVDLVQKYLEKYYNLKNDGRQVEKRRNSGPVVEKLKQMQEFFGLKVTGKPDAETLKVMKQPRCGVPDVAQFVLTEGNPRWEQTHLTYRIENYTPDLPRADVDHAIEKAFQLWSNVTPLTFTKVSEGQADIMISFVRGDHRDNSPFDGGGGNLAHAFQPGPGIGGDAHFDEDERWTNNFREYNLHRVAAHELGHSLGLSHSTDIGALMYPSYTFSGDVQLAQDDIDGIQAIYGRSQNPVQPIGPQTPKACDSKLTFDAITTIRGEVMFFKDRFYMRTNPFYPEVELNFISVFWPQLPNGLEAAYEFADRDEVRFFKGNKYWAVQGQNVLHGYPKDIYSSFGFPRTVKHIDAALSEENTGKTYFFVANKYWRYDEYKRSMDPGYPKMIAHDFPGIGHKVDAVFMKDGFFYFFHGTRQYKFDPKTKRILTLQKANSWFNCRKN

SEQ ID NO: 502 - protein, 450 aa, Artificial Sequence
  MMP-1 variant P170D
FPATLETQEQDVDLVQKYLEKYYNLKNDGRQVEKRRNSGPVVEKLKQMQEFFGLKVTGKPDAETLKVMKQPRCGVPDVAQFVLTEGNPRWEQTHLTYRIENYTPDLPRADVDHAIEKAFQLWSNVTPLTFTKVSEGQADIMISFVRGDHRDNSPFDGPGGNLAHAFQPGDGIGGDAHFDEDERWTNNFREYNLHRVAAHELGHSLGLSHSTDIGALMYPSYTFSGDVQLAQDDIDGIQAIYGRSQNPVQPIGPQTPKACDSKLTFDAITTIRGEVMFFKDRFYMRTNPFYPEVELNFISVFWPQLPNGLEAAYEFADRDEVRFFKGNKYWAVQGQNVLHGYPKDIYSSFGFPRTVKHIDAALSEENTGKTYFFVANKYWRYDEYKRSMDPGYPKMIAHDFPGIGHKVDAVFMKDGFFYFFHGTRQYKFDPKTKRILTLQKANSWFNCRKN

SEQ ID NO: 503 - protein, 450 aa, Artificial Sequence
  MMP-1 variant P170A
FPATLETQEQDVDLVQKYLEKYYNLKNDGRQVEKRRNSGPVVEKLKQMQEFFGLKVTGKPDAETLKVMKQPRCGVPDVAQFVLTEGNPRWEQTHLTYRIENYTPDLPRADVDHAIEKAFQLWSNVTPLTFTKVSEGQADIMISFVRGDHRDNSPFDGPGGNLAHAFQPGAGIGGDAHFDEDERWTNNFREYNLHRVAAHELGHSLGLSHSTDIGALMYPSYTFSGDVQLAQDDIDGIQAIYGRSQNPVQPIGPQTPKACDSKLTFDAITTIRGEVMFFKDRFYMRTNPFYPEVELNFISVFWPQLPNGLEAAYEFADRDEVRFFKGNKYWAVQGQNVLHGYPKDIYSSFGFPRTVKHIDAALSEENTGKTYFFVANKYWRYDEYKRSMDPGYPKMIAHDFPGIGHKVDAVFMKDGFFYFFHGTRQYKFDPKTKRILTLQKANSWFNCRKN

SEQ ID NO: 504 - protein, 450 aa, Artificial Sequence
  MMP-1 variant F178T
FPATLETQEQDVDLVQKYLEKYYNLKNDGRQVEKRRNSGPVVEKLKQMQEFFGLKVTGKPDAETLKVMKQPRCGVPDVAQFVLTEGNPRWEQTHLTYRIENYTPDLPRADVDHAIEKAFQLWSNVTPLTFTKVSEGQADIMISFVRGDHRDNSPFDGPGGNLAHAFQPGPGIGGDAHTDEDERWTNNFREYNLHRVAAHELGHSLGLSHSTDIGALMYPSYTFSGDVQLAQDDIDGIQAIYGRSQNPVQPIGPQTPKACDSKLTFDAITTIRGEVMFFKDRFYMRTNPFYPEVELNFISVFWPQLPNGLEAAYEFADRDEVRFFKGNKYWAVQGQNVLHGYPKDIYSSFGFPRTVKHIDAALSEENTGKTYFFVANKYWRYDEYKRSMDPGYPKMIAHDFPGIGHKVDAVFMKDGFFYFFHGTRQYKFDPKTKRILTLQKANSWFNCRKN

SEQ ID NO: 505 - protein, 450 aa, Artificial Sequence
  MMP-1 variant F178L
FPATLETQEQDVDLVQKYLEKYYNLKNDGRQVEKRRNSGPVVEKLKQMQEFFGLKVTGKPDAETLKVMKQPRCGVPDVAQFVLTEGNPRWEQTHLTYRIENYTPDLPRADVDHAIEKAFQLWSNVTPLTFTKVSEGQADIMISFVRGDHRDNSPFDGPGGNLAHAFQPGPGIGGDAHLDEDERWTNNFREYNLHRVAAHELGHSLGLSHSTDIGALMYPSYTFSGDVQLAQDDIDGIQAIYGRSQNPVQPIGPQTPKACDSKLTFDAITTIRGEVMFFKDRFYMRTNPFYPEVELNFISVFWPQLPNGLEAAYEFADRDEVRFFKGNKYWAVQGQNVLHGYPKDIYSSFGFPRTVKHIDAALSEENTGKTYFFVANKYWRYDEYKRSMDPGYPKMIAHDFPGIGHKVDAVFMKDGFFYFFHGTRQYKFDPKTKRILTLQKANSWFNCRKN

SEQ ID NO: 506 - protein, 450 aa, Artificial Sequence
  MMP-1 variant R183S
FPATLETQEQDVDLVQKYLEKYYNLKNDGRQVEKRRNSGPVVEKLKQMQEFFGLKVTGKPDAETLKVMKQPRCGVPDVAQFVLTEGNPRWEQTHLTYRIENYTPDLPRADVDHAIEKAFQLWSNVTPLTFTKVSEGQADIMISFVRGDHRDNSPFDGPGGNLAHAFQPGPGIGGDAHFDEDESWTNNFREYNLHRVAAHELGHSLGLSHSTDIGALMYPSYTFSGDVQLAQDDIDGIQAIYGRSQNPVQPIGPQTPKACDSKLTFDAITTIRGEVMFFKDRFYMRTNPFYPEVELNFISVFWPQLPNGLEAAYEFADRDEVRFFKGNKYWAVQGQNVLHGYPKDIYSSFGFPRTVKHIDAALSEENTGKTYFFVANKYWRYDEYKRSMDPGYPKMIAHDFPGIGHKVDAVFMKDGFFYFFHGTRQYKFDPKTKRILTLQKANSWFNCRKN

SEQ ID NO: 507 - protein, 450 aa, Artificial Sequence
  MMP-1 variant R183G
FPATLETQEQDVDLVQKYLEKYYNLKNDGRQVEKRRNSGPVVEKLKQMQEFFGLKVTGKPDAETLKVMKQPRCGVPDVAQFVLTEGNPRWEQTHLTYRIENYTPDLPRADVDHAIEKAFQLWSNVTPLTFTKVSEGQADIMISFVRGDHRDNSPFDGPGGNLAHAFQPGPGIGGDAHFDEDEGWTNNFREYNLHRVAAHELGHSLGLSHSTDIGALMYPSYTFSGDVQLAQDDIDGIQAIYGRSQNPVQPIGPQTPKACDSKLTFDAITTIRGEVMFFKDRFYMRTNPFYPEVELNFISVFWPQLPNGLEAAYEFADRDEVRFFKGNKYWAVQGQNVLHGYPKDIYSSFGFPRTVKHIDAALSEENTGKTYFFVANKYWRYDEYKRSMDPGYPKMIAHDFPGIGHKVDAVFMKDGFFYFFHGTRQYKFDPKTKRILTLQKANSWFNCRKN

SEQ ID NO: 508 - protein, 450 aa, Artificial Sequence
  MMP-1 variant F188V
FPATLETQEQDVDLVQKYLEKYYNLKNDGRQVEKRRNSGPVVEKLKQMQEFFGLKVTGKPDAETLKVMKQPRCGVPDVAQFVLTEGNPRWEQTHLTYRIENYTPDLPRADVDHAIEKAFQLWSNVTPLTFTKVSEGQADIMISFVRGDHRDNSPFDGPGGNLAHAFQPGPGIGGDAHFDEDERWTNNVREYNLHRVAAHELGHSLGLSHSTDIGALMYPSYTFSGDVQLAQDDIDGIQAIYGRSQNPVQPIGPQTPKACDSKLTFDAITTIRGEVMFFKDRFYMRTNPFYPEVELNFISVFWPQLPNGLEAAYEFADRDEVRFFKGNKYWAVQGQNVLHGYPKDIYSSFGFPRTVKHIDAALSEENTGKTYFFVANKYWRYDEYKRSMDPGYPKMIAHDFPGIGHKVDAVFMKDGFFYFFHGTRQYKFDPKTKRILTLQKANSWFNCRKN

SEQ ID NO: 509 - protein, 450 aa, Artificial Sequence
  MMP-1 variant R189N
FPATLETQEQDVDLVQKYLEKYYNLKNDGRQVEKRRNSGPVVEKLKQMQEFFGLKVTGKPDAETLKVMKQPRCGVPDVAQFVLTEGNPRWEQTHLTYRIENYTPDLPRADVDHAIEKAFQLWSNVTPLTFTKVSEGQADIMISFVRGDHRDNSPFDGPGGNLAHAFQPGPGIGGDAHFDEDERWTNNFNEYNLHRVAAHELGHSLGLSHSTDIGALMYPSYTFSGDVQLAQDDIDGIQAIYGRSQNPVQPIGPQTPKACDSKLTFDAITTIRGEVMFFKDRFYMRTNPFYPEVELNFISVFWPQLPNGLEAAYEFADRDEVRFFKGNKYWAVQGQNVLHGYPKDIYSSFGFPRTVKHIDAALSEENTGKTYFFVANKYWRYDEYKRSMDPGYPKMIAHDFPGIGHKVDAVFMKDGFFYFFHGTRQYKFDPKTKRILTLQKANSWFNCRKN

SEQ ID NO: 510 - protein, 450 aa, Artificial Sequence
  MMP-1 variant R189Q
FPATLETQEQDVDLVQKYLEKYYNLKNDGRQVEKRRNSGPVVEKLKQMQEFFGLKVTGKPDAETLKVMKQPRCGVPDVAQFVLTEGNPRWEQTHLTYRIENYTPDLPRADVDHAIEKAFQLWSNVTPLTFTKVSEGQADIMISFVRGDHRDNSPFDGPGGNLAHAFQPGPGIGGDAHFDEDERWTNNFQEYNLHRVAAHELGHSLGLSHSTDIGALMYPSYTFSGDVQLAQDDIDGIQAIYGRSQNPVQPIGPQTPKACDSKLTFDAITTIRGEVMFFKDRFYMRTNPFYPEVELNFISVFWPQLPNGLEAAYEFADRDEVRFFKGNKYWAVQGQNVLHGYPKDIYSSFGFPRTVKHIDAALSEENTGKTYFFVANKYWRYDEYKRSMDPGYPKMIAHDFPGIGHKVDAVFMKDGFFYFFHGTRQYKFDPKTKRILTLQKANSWFNCRKN

SEQ ID NO: 511 - protein, 450 aa, Artificial Sequence
  MMP-1 variant R189T
FPATLETQEQDVDLVQKYLEKYYNLKNDGRQVEKRRNSGPVVEKLKQMQEFFGLKVTGKPDAETLKVMKQPRCGVPDVAQFVLTEGNPRWEQTHLTYRIENYTPDLPRADVDHAIEKAFQLWSNVTPLTFTKVSEGQADIMISFVRGDHRDNSPFDGPGGNLAHAFQPGPGIGGDAHFDEDERWTNNFTEYNLHRVAAHELGHSLGLSHSTDIGALMYPSYTFSGDVQLAQDDIDGIQAIYGRSQNPVQPIGPQTPKACDSKLTFDAITTIRGEVMFFKDRFYMRTNPFYPEVELNFISVFWPQLPNGLEAAYEFADRDEVRFFKGNKYWAVQGQNVLHGYPKDIYSSFGFPRTVKHIDAALSEENTGKTYFFVANKYWRYDEYKRSMDPGYPKMIAHDFPGIGHKVDAVFMKDGFFYFFHGTRQYKFDPKTKRILTLQKANSWFNCRKN

SEQ ID NO: 512 - protein, 450 aa, Artificial Sequence
  MMP-1 variant A197C
FPATLETQEQDVDLVQKYLEKYYNLKNDGRQVEKRRNSGPVVEKLKQMQEFFGLKVTGKPDAETLKVMKQPRCGVPDVAQFVLTEGNPRWEQTHLTYRIENYTPDLPRADVDHAIEKAFQLWSNVTPLTFTKVSEGQADIMISFVRGDHRDNSPFDGPGGNLAHAFQPGPGIGGDAHFDEDERWTNNFREYNLHRVCAHELGHSLGLSHSTDIGALMYPSYTFSGDVQLAQDDIDGIQAIYGRSQNPVQPIGPQTPKACDSKLTFDAITTIRGEVMFFKDRFYMRTNPFYPEVELNFISVFWPQLPNGLEAAYEFADRDEVRFFKGNKYWAVQGQNVLHGYPKDIYSSFGFPRTVKHIDAALSEENTGKTYFFVANKYWRYDEYKRSMDPGYPKMIAHDFPGIGHKVDAVFMKDGFFYFFHGTRQYKFDPKTKRILTLQKANSWFNCRKN

SEQ ID NO: 513 - protein, 450 aa, Artificial Sequence
  MMP-1 variant S208R
FPATLETQEQDVDLVQKYLEKYYNLKNDGRQVEKRRNSGPVVEKLKQMQEFFGLKVTGKPDAETLKVMKQPRCGVPDVAQFVLTEGNPRWEQTHLTYRIENYTPDLPRADVDHAIEKAFQLWSNVTPLTFTKVSEGQADIMISFVRGDHRDNSPFDGPGGNLAHAFQPGPGIGGDAHFDEDERWTNNFREYNLHRVAAHELGHSLGLRHSTDIGALMYPSYTFSGDVQLAQDDIDGIQAIYGRSQNPVQPIGPQTPKACDSKLTFDAITTIRGEVMFFKDRFYMRTNPFYPEVELNFISVFWPQLPNGLEAAYEFADRDEVRFFKGNKYWAVQGQNVLHGYPKDIYSSFGFPRTVKHIDAALSEENTGKTYFFVANKYWRYDEYKRSMDPGYPKMIAHDFPGIGHKVDAVFMKDGFFYFFHGTRQYKFDPKTKRILTLQKANSWFNCRKN

SEQ ID NO: 514 - protein, 450 aa, Artificial Sequence
  MMP-1 variant S208L
FPATLETQEQDVDLVQKYLEKYYNLKNDGRQVEKRRNSGPVVEKLKQMQEFFGLKVTGKPDAETLKVMKQPRCGVPDVAQFVLTEGNPRWEQTHLTYRIENYTPDLPRADVDHAIEKAFQLWSNVTPLTFTKVSEGQADIMISFVRGDHRDNSPFDGPGGNLAHAFQPGPGIGGDAHFDEDERWTNNFREYNLHRVAAHELGHSLGLLHSTDIGALMYPSYTFSGDVQLAQDDIDGIQAIYGRSQNPVQPIGPQTPKACDSKLTFDAITTIRGEVMFFKDRFYMRTNPFYPEVELNFISVFWPQLPNGLEAAYEFADRDEVRFFKGNKYWAVQGQNVLHGYPKDIYSSFGFPRTVKHIDAALSEENTGKTYFFVANKYWRYDEYKRSMDPGYPKMIAHDFPGIGHKVDAVFMKDGFFYFFHGTRQYKFDPKTKRILTLQKANSWFNCRKN

SEQ ID NO: 515 - protein, 450 aa, Artificial Sequence
  MMP-1 variant T211L
FPATLETQEQDVDLVQKYLEKYYNLKNDGRQVEKRRNSGPVVEKLKQMQEFFGLKVTGKPDAETLKVMKQPRCGVPDVAQFVLTEGNPRWEQTHLTYRIENYTPDLPRADVDHAIEKAFQLWSNVTPLTFTKVSEGQADIMISFVRGDHRDNSPFDGPGGNLAHAFQPGPGIGGDAHFDEDERWTNNFREYNLHRVAAHELGHSLGLSHSLDIGALMYPSYTFSGDVQLAQDDIDGIQAIYGRSQNPVQPIGPQTPKACDSKLTFDAITTIRGEVMFFKDRFYMRTNPFYPEVELNFISVFWPQLPNGLEAAYEFADRDEVRFFKGNKYWAVQGQNVLHGYPKDIYSSFGFPRTVKHIDAALSEENTGKTYFFVANKYWRYDEYKRSMDPGYPKMIAHDFPGIGHKVDAVFMKDGFFYFFHGTRQYKFDPKTKRILTLQKANSWFNCRKN

SEQ ID NO: 516 - protein, 450 aa, Artificial Sequence
  MMP-1 variant I237N
FPATLETQEQDVDLVQKYLEKYYNLKNDGRQVEKRRNSGPVVEKLKQMQEFFGLKVTGKPDAETLKVMKQPRCGVPDVAQFVLTEGNPRWEQTHLTYRIENYTPDLPRADVDHAIEKAFQLWSNVTPLTFTKVSEGQADIMISFVRGDHRDNSPFDGPGGNLAHAFQPGPGIGGDAHFDEDERWTNNFREYNLHRVAAHELGHSLGLSHSTDIGALMYPSYTFSGDVQLAQDDIDGNQAIYGRSQNPVQPIGPQTPKACDSKLTFDAITTIRGEVMFFKDRFYMRTNPFYPEVELNFISVFWPQLPNGLEAAYEFADRDEVRFFKGNKYWAVQGQNVLHGYPKDIYSSFGFPRTVKHIDAALSEENTGKTYFFVANKYWRYDEYKRSMDPGYPKMIAHDFPGIGHKVDAVFMKDGFFYFFHGTRQYKFDPKTKRILTLQKANSWFNCRKN

SEQ ID NO: 517 - protein, 450 aa, Artificial Sequence
  MMP-1 variant I237W
FPATLETQEQDVDLVQKYLEKYYNLKNDGRQVEKRRNSGPVVEKLKQMQEFFGLKVTGKPDAETLKVMKQPRCGVPDVAQFVLTEGNPRWEQTHLTYRIENYTPDLPRADVDHAIEKAFQLWSNVTPLTFTKVSEGQADIMISFVRGDHRDNSPFDGPGGNLAHAFQPGPGIGGDAHFDEDERWTNNFREYNLHRVAAHELGHSLGLSHSTDIGALMYPSYTFSGDVQLAQDDIDGWQAIYGRSQNPVQPIGPQTPKACDSKLTFDAITTIRGEVMFFKDRFYMRTNPFYPEVELNFISVFWPQLPNGLEAAYEFADRDEVRFFKGNKYWAVQGQNVLHGYPKDIYSSFGFPRTVKHIDAALSEENTGKTYFFVANKYWRYDEYKRSMDPGYPKMIAHDFPGIGHKVDAVFMKDGFFYFFHGTRQYKFDPKTKRILTLQKANSWFNCRKN

SEQ ID NO: 518 - protein, 450 aa, Artificial Sequence
  MMP-1 variant I237W
FPATLETQEQDVDLVQKYLEKYYNLKNDGRQVEKRRNSGPVVEKLKQMQEFFGLKVTGKPDAETLKVMKQPRCGVPDVAQFVLTEGNPRWEQTHLTYRIENYTPDLPRADVDHAIEKAFQLWSNVTPLTFTKVSEGQADIMISFVRGDHRDNSPFDGPGGNLAHAFQPGPGIGGDAHFDEDERWTNNFREYNLHRVAAHELGHSLGLSHSTDIGALMYPSYTFSGDVQLAQDDIDGLQAIYGRSQNPVQPIGPQTPKACDSKLTFDAITTIRGEVMFFKDRFYMRTNPFYPEVELNFISVFWPQLPNGLEAAYEFADRDEVRFFKGNKYWAVQGQNVLHGYPKDIYSSFGFPRTVKHIDAALSEENTGKTYFFVANKYWRYDEYKRSMDPGYPKMIAHDFPGIGHKVDAVFMKDGFFYFFHGTRQYKFDPKTKRILTLQKANSWFNCRKN

SEQ ID NO: 519 - protein, 450 aa, Artificial Sequence
  MMP-1 variant I251S
FPATLETQEQDVDLVQKYLEKYYNLKNDGRQVEKRRNSGPVVEKLKQMQEFFGLKVTGKPDAETLKVMKQPRCGVPDVAQFVLTEGNPRWEQTHLTYRIENYTPDLPRADVDHAIEKAFQLWSNVTPLTFTKVSEGQADIMISFVRGDHRDNSPFDGPGGNLAHAFQPGPGIGGDAHFDEDERWTNNFREYNLHRVAAHELGHSLGLSHSTDIGALMYPSYTFSGDVQLAQDDIDGIQAIYGRSQNPVQPSGPQTPKACDSKLTFDAITTIRGEVMFFKDRFYMRTNPFYPEVELNFISVFWPQLPNGLEAAYEFADRDEVRFFKGNKYWAVQGQNVLHGYPKDIYSSFGFPRTVKHIDAALSEENTGKTYFFVANKYWRYDEYKRSMDPGYPKMIAHDFPGIGHKVDAVFMKDGFFYFFHGTRQYKFDPKTKRILTLQKANSWFNCRKN

SEQ ID NO: 520 - protein, 450 aa, Artificial Sequence
  MMP-1 variant I251W
FPATLETQEQDVDLVQKYLEKYYNLKNDGRQVEKRRNSGPVVEKLKQMQEFFGLKVTGKPDAETLKVMKQPRCGVPDVAQFVLTEGNPRWEQTHLTYRIENYTPDLPRADVDHAIEKAFQLWSNVTPLTFTKVSEGQADIMISFVRGDHRDNSPFDGPGGNLAHAFQPGPGIGGDAHFDEDERWTNNFREYNLHRVAAHELGHSLGLSHSTDIGALMYPSYTFSGDVQLAQDDIDGIQAIYGRSQNPVQPWGPQTPKACDSKLTFDAITTIRGEVMFFKDRFYMRTNPFYPEVELNFISVFWPQLPNGLEAAYEFADRDEVRFFKGNKYWAVQGQNVLHGYPKDIYSSFGFPRTVKHIDAALSEENTGKTYFFVANKYWRYDEYKRSMDPGYPKMIAHDFPGIGHKVDAVFMKDGFFYFFHGTRQYKFDPKTKRILTLQKANSWFNCRKN

SEQ ID NO: 521 - protein, 450 aa, Artificial Sequence
  MMP-1 variant Q254S
FPATLETQEQDVDLVQKYLEKYYNLKNDGRQVEKRRNSGPVVEKLKQMQEFFGLKVTGKPDAETLKVMKQPRCGVPDVAQFVLTEGNPRWEQTHLTYRIENYTPDLPRADVDHAIEKAFQLWSNVTPLTFTKVSEGQADIMISFVRGDHRDNSPFDGPGGNLAHAFQPGPGIGGDAHFDEDERWTNNFREYNLHRVAAHELGHSLGLSHSTDIGALMYPSYTFSGDVQLAQDDIDGIQAIYGRSQNPVQPIGPSTPKACDSKLTFDAITTIRGEVMFFKDRFYMRTNPFYPEVELNFISVFWPQLPNGLEAAYEFADRDEVRFFKGNKYWAVQGQNVLHGYPKDIYSSFGFPRTVKHIDAALSEENTGKTYFFVANKYWRYDEYKRSMDPGYPKMIAHDFPGIGHKVDAVFMKDGFFYFFHGTRQYKFDPKTKRILTLQKANSWFNCRKN

SEQ ID NO: 522 - protein, 450 aa, Artificial Sequence
  MMP-1 variant T255H
FPATLETQEQDVDLVQKYLEKYYNLKNDGRQVEKRRNSGPVVEKLKQMQEFFGLKVTGKPDAETLKVMKQPRCGVPDVAQFVLTEGNPRWEQTHLTYRIENYTPDLPRADVDHAIEKAFQLWSNVTPLTFTKVSEGQADIMISFVRGDHRDNSPFDGPGGNLAHAFQPGPGIGGDAHFDEDERWTNNFREYNLHRVAAHELGHSLGLSHSTDIGALMYPSYTFSGDVQLAQDDIDGIQAIYGRSQNPVQPIGPQHPKACDSKLTFDAITTIRGEVMFFKDRFYMRTNPFYPEVELNFISVFWPQLPNGLEAAYEFADRDEVRFFKGNKYWAVQGQNVLHGYPKDIYSSFGFPRTVKHIDAALSEENTGKTYFFVANKYWRYDEYKRSMDPGYPKMIAHDFPGIGHKVDAVFMKDGFFYFFHGTRQYKFDPKTKRILTLQKANSWFNCRKN

SEQ ID NO: 523 - protein, 450 aa, Artificial Sequence
  MMP-1 variant P256C
FPATLETQEQDVDLVQKYLEKYYNLKNDGRQVEKRRNSGPVVEKLKQMQEFFGLKVTGKPDAETLKVMKQPRCGVPDVAQFVLTEGNPRWEQTHLTYRIENYTPDLPRADVDHAIEKAFQLWSNVTPLTFTKVSEGQADIMISFVRGDHRDNSPFDGPGGNLAHAFQPGPGIGGDAHFDEDERWTNNFREYNLHRVAAHELGHSLGLSHSTDIGALMYPSYTFSGDVQLAQDDIDGIQAIYGRSQNPVQPIGPQTCKACDSKLTFDAITTIRGEVMFFKDRFYMRTNPFYPEVELNFISVFWPQLPNGLEAAYEFADRDEVRFFKGNKYWAVQGQNVLHGYPKDIYSSFGFPRTVKHIDAALSEENTGKTYFFVANKYWRYDEYKRSMDPGYPKMIAHDFPGIGHKVDAVFMKDGFFYFFHGTRQYKFDPKTKRILTLQKANSWFNCRKN

SEQ ID NO: 524 - protein, 450 aa, Artificial Sequence
  MMP-1 variant P256C
FPATLETQEQDVDLVQKYLEKYYNLKNDGRQVEKRRNSGPVVEKLKQMQEFFGLKVTGKPDAETLKVMKQPRCGVPDVAQFVLTEGNPRWEQTHLTYRIENYTPDLPRADVDHAIEKAFQLWSNVTPLTFTKVSEGQADIMISFVRGDHRDNSPFDGPGGNLAHAFQPGPGIGGDAHFDEDERWTNNFREYNLHRVAAHELGHSLGLSHSTDIGALMYPSYTFSGDVQLAQDDIDGIQAIYGRSQNPVQPIGPQTPTACDSKLTFDAITTIRGEVMFFKDRFYMRTNPFYPEVELNFISVFWPQLPNGLEAAYEFADRDEVRFFKGNKYWAVQGQNVLHGYPKDIYSSFGFPRTVKHIDAALSEENTGKTYFFVANKYWRYDEYKRSMDPGYPKMIAHDFPGIGHKVDAVFMKDGFFYFFHGTRQYKFDPKTKRILTLQKANSWFNCRKN

SEQ ID NO: 525 - protein, 450 aa, Artificial Sequence
  MMP-1 variant P256C
FPATLETQEQDVDLVQKYLEKYYNLKNDGRQVEKRRNSGPVVEKLKQMQEFFGLKVTGKPDAETLKVMKQPRCGVPDVAQFVLTEGNPRWEQTHLTYRIENYTPDLPRADVDHAIEKAFQLWSNVTPLTFTKVSEGQADIMISFVRGDHRDNSPFDGPGGNLAHAFQPGPGIGGDAHFDEDERWTNNFREYNLHRVAAHELGHSLGLSHSTDIGALMYPSYTFSGDVQLAQDDIDGIQAIYGRSQNPVQPIGPQTPPACDSKLTFDAITTIRGEVMFFKDRFYMRTNPFYPEVELNFISVFWPQLPNGLEAAYEFADRDEVRFFKGNKYWAVQGQNVLHGYPKDIYSSFGFPRTVKHIDAALSEENTGKTYFFVANKYWRYDEYKRSMDPGYPKMIAHDFPGIGHKVDAVFMKDGFFYFFHGTRQYKFDPKTKRILTLQKANSWFNCRKN

SEQ ID NO: 526 - protein, 450 aa, Artificial Sequence
  MMP-1 variant A258P
FPATLETQEQDVDLVQKYLEKYYNLKNDGRQVEKRRNSGPVVEKLKQMQEFFGLKVTGKPDAETLKVMKQPRCGVPDVAQFVLTEGNPRWEQTHLTYRIENYTPDLPRADVDHAIEKAFQLWSNVTPLTFTKVSEGQADIMISFVRGDHRDNSPFDGPGGNLAHAFQPGPGIGGDAHFDEDERWTNNFREYNLHRVAAHELGHSLGLSHSTDIGALMYPSYTFSGDVQLAQDDIDGIQAIYGRSQNPVQPIGPQTPKPCDSKLTFDAITTIRGEVMFFKDRFYMRTNPFYPEVELNFISVFWPQLPNGLEAAYEFADRDEVRFFKGNKYWAVQGQNVLHGYPKDIYSSFGFPRTVKHIDAALSEENTGKTYFFVANKYWRYDEYKRSMDPGYPKMIAHDFPGIGHKVDAVFMKDGFFYFFHGTRQYKFDPKTKRILTLQKANSWFNCRKN

SEQ ID NO: 527 - protein, 450 aa, Sus scrofa
  Pig MMP-1 zymogen
PAATSETQEQDVEIVQKYLKNYYNLNSDGVPVEKKRNSGLVVEKLKQMQQFFGLKVTGKPDAETLNVMKQPRCGVPDVAEFVLTPGNPRWENTHLTYRIENYTPDLSREDVDRAIEKAFQLWSNVSPLTFTKVSEGQADIMISFVRGDHRDNSPFDGPGGNLAHAFQPGPGIGGDAHFDEDERWTKNFRDYNLYRVAAHELGHSLGLSHSTDIGALMYPNYIYTGDVQLSQDDIDGIQAIYGPSENPVQPSGPQTPQVCDSKLTFDAITTLRGELMFFKDRFYMRTNSFYPEVELNFISVFWPQVPNGLQAAYEIADRDEVRFFKGNKYWAVRGQDVLYGYPKDIHRSFGFPSTVKNIDAAVFEEDTGKTYFFVAHECWRYDEYKQSMDTGYPKMIAEEFPGIGNKVDAVFQKDGFLYFFHGTRQYQFDFKTKRILTLQKANSWFNCRKN

SEQ ID NO: 528 - protein, 450 aa, Oryctolagus cuniculus
  Rabbit MMP-1 zymogen
FPAASETQEQDVEMVQKYLENYYNLKDDWRKIPKQRGNGLAVEKLKQMQEFFGLKVTGKPDAETLKMMKQPRCGVPDVAQFVLTPGNPRWEQTHLTYRIENYTPDLSRADVDNAIEKAFQLWSNVTPLTFTKVSKGQADIMISFVRGDHRDNSPFDGPEGQLAHAFQPGLGIGGDVHFDEDDRWTKDFRNYNLYRVAAHELGHSLGLSHSTDIGALMYPNYMFSGDVQLAQDDIDGIQAIYGPSQNPSQPVGPQTPKVCDSKLTFDAITTIRGEIMFFKDRFYMRANPYYSEVELNFISVFWPHLPNGLQAAYEVAHRDEILFFKGNKYWTVQGQNELPGYPKDIHSSFGFPRSVNHIDAAVSEEDTGKTYFFVANKYWRYDEYKRSMDAGYPKMIEYDFPGIGNKVDAVFKKDGFFYFFHGTRQYKFDPKTKRILTLQKANSWFNCRKN

SEQ ID NO: 529 - protein, 451 aa, Bos taurus
  Cow MMP-1
FPAATSETQEQDVETVKKYLENYYNLNSNGKKVERQRNGGLITEKLKQMQKFFGLRVTGKPDAETLNVMKQPRCGVPDVAPFVLTPGKSCWENTNLTYRIENYTPDLSRADVDQAIEKAFQLWSNVTPLTFTKVSEGQADIMISFVRGDHRDNSPFDGPGGNLAHAFQPGAGIGGDAHFDDDEWWTSNFQDYNLYRVAAHEFGHSLGLAHSTDIGALMYPSYTFSGDVQLSQDDIDGIQAIYGPSQNPTQPVGPQTPEVCDSKLTFDAITTIRGEVMFFKDRFYMRTNPLYPEVELNFISVFWPQLPNGLQAAYEVADRDEVRFFKGNKYWAVKGQDVLRGYPRDIYRSFGFPRTVKSIDAAVSEEDTGKTYFFVANKCWRYDEYKQSMDAGYPKMIAEDFPGIGNKVDAVFQKGGFFYFFHGRRQYKFDPQTKRILTLLKANSWFNCRKN

SEQ ID NO: 530 - protein, 451 aa, Equus caballus
  Horse MMP-1
FPTVPSETREEDVEMVQKYLENYYNLKSDGEQIEKQRHRSPVVEKLKQMQEFFGLKVTGKPDAETLNVMKQPRCGVPDVAEFVLTEGNPRWENTHLTYRIENYTPDLPRADVDQAIEKAFQLWSNVSPLTFTKVSEGQADIMISFVRGDHRDNSPFDGPGGNLAHAFQPGPRIGGDAHFDEDETWTSNFRNYNLYRVAAHEFGHSLGLSHSTDIGALMYPNYFFTGDVQLSQDDINGIQAIYGPSQNPIQPIGPQTPEVCDSKLTFDAITTIRGEVMFFKDRFYMRINPYYPEAELNFISIFWPQLPNGLQAAYEVSHRDEVRFFKGNKYWAVKGQDVLYGYPKDIHRSFGFPSTVKNIDAAVSEEDTGKTYFFVADKYWRYDEYKRSMDAGYPKMIADDFPGIGDKVDAVFQKDGFFYFFHGTRQYKFDPKTKRILTLQKANSWFNCRKN

SEQ ID NO: 531 - protein, 447 aa, Rattus norvegicus
  Rat MMP-1a
FPVFQDGARQNVETVWKYLENYYNLGEDVQAKNVDAKEVMAEKLRQMQQLFGLKVTGNSNSETLSAMRKPRCGVPDVAPYAITHNNPRWTKTHLTYSILNYTPYLPKEVIENAIERAFKVWSDVTPLTFERVFEEEGDIVFAFYRGDHSDNNPFDGPEYGLAHTFPPGPRLGGDVHYDLDETWTDNSDNFNLFYVTAHELGHSLGLTHSRDVGALMFPSYTWYTEDFVLNQEDINRIQALYGPSPNPIQPTGATTPHPCDGDLTFDAITTFRGEVMFFKGRFYIRVNKFMPEAELNLIGIIWPNLPGKLDAAYEVSMIDQVRYFKGNKVWVVREHTVLRGFPTDIHSFFGFPSSVTHIDAAVCEEETGKTYFFVDNMYWRYDENTQSMDPGYPRLTAEDFPGIDDKVDDVFQKGENFYFFHQSVQRRFSLRIRRVDDSRDSSTWFNC

SEQ ID NO: 532 - protein, 447 aa, Mus musculus
  Mouse MMP-1a
FPVFHNGDRQNVETVWKYLENYYNLGKNMQAKNVNGKEMMAEKLRQMQQLFGLKVTGNSDPETLRAMKKPRCGVPDVAPYAITHNNPRWTKTHLTYSILNYTPYLPKAVVEDAIARAFRVWSDVTPLTFQRVFEEEGDIVLSFHRGDHGDNNPFDGPNYKLAHTFQPGPGLGGDVHYDLDETWTNSSENFNLFYVTAHELGHSLGLTHSSDIGALMFPSYTWYTEDFVLNQDDINRIQDLYGPSPNPIQPTGATTPHPCNGDLTFDAITTFRGEVFFFKGRFYIRVNRFMPEPELNLIGILWPNLPVKLDAAYEASMIDQVRYFKGSKVWAVQEQSVLRGFPRDIHSFFGFPSNVTHIDAAVCEEETGKTYFFVDHMYWRYDENTQSMDPGYPRLTAEDFPGIDDKVDDVFQKGENFYFFHQSVQHRFNLQIRRVDDSRDSSTWFNC

SEQ ID NO: 533 - DNA, 5369 bp, Artificial Sequence
  pET303CTHis vector
gatctcgatcccgcgaaattaatacgactcactataggggaattgtgagcggataacaattcccctctagtaataattttgtttaactttaagaaggaggtctagaatgcatctcgagcaccaccaccaccaccactgagatccggctgctaacaaagcccgaaaggaagctgagttggctgctgccaccgctgagcaataactagcataaccccttggggcctctaaacgggtcttgaggggttttttgctgaaaggaggaactatatccggattggcgaatgggacgcgccctgtagcggcgcattaagcgcggcgggtgtggtggttacgcgcagcgtgaccgctacacttgccagcgccctagcgcccgctcctttcgctttcttcccttcctttctcgccacgttcgccggctttccccgtcaagctctaaatcgggggctccctttagggttccgatttagtgctttacggcacctcgaccccaaaaaacttgattagggtgatggttcacgtagtgggccatcgccctgatagacggtttttcgccctttgacgttggagtccacgttctttaatagtggactcttgttccaaactggaacaacactcaaccctatctcggtctattcttttgatttataagggattttgccgatttcggcctattggttaaaaaatgagctgatttaacaaaaatttaacgcgaattttaacaaaatattaacgtttacaatttcaggtggcacttttcggggaaatgtgcgcggaacccctatttgtttatttttctaaatacattcaaatatgtatccgctcatgagacaataaccctgataaatgcttcaataatattgaaaaaggaagagtatgagtattcaacatttccgtgtcgcccttattcccttttttgcggcattttgccttcctgtttttgctcacccagaaacgctggtgaaagtaaaagatgctgaagatcagttgggtgcacgagtgggttacatcgaactggatctcaacagcggtaagatccttgagagttttcgccccgaagaacgttttccaatgatgagcacttttaaagttctgctatgtggcgcggtattatcccgtattgacgccgggcaagagcaactcggtcgccgcatacactattctcagaatgacttggttgagtactcaccagtcacagaaaagcatcttacggatggcatgacagtaagagaattatgcagtgctgccataaccatgagtgataacactgcggccaacttacttctgacaacgatcggaggaccgaaggagctaaccgcttttttgcacaacatgggggatcatgtaactcgccttgatcgttgggaaccggagctgaatgaagccataccaaacgacgagcgtgacaccacgatgcctgcagcaatggcaacaacgttgcgcaaactattaactggcgaactacttactctagcttcccggcaacaattaatagactggatggaggcggataaagttgcaggaccacttctgcgctcggcccttccggctggctggtttattgctgataaatctggagccggtgagcgtgggtctcgcggtatcattgcagcactggggccagatggtaagccctcccgtatcgtagttatctacacgacggggagtcaggcaactatggatgaacgaaatagacagatcgctgagataggtgcctcactgattaagcattggtaactgtcagaccaagtttactcatatatactttagattgatttaaaacttcatttttaatttaaaaggatctaggtgaagatcctttttgataatctcatgaccaaaatcccttaacgtgagttttcgttccactgagcgtcagaccccgtagaaaagatcaaaggatcttcttgagatcctttttttctgcgcgtaatctgctgcttgcaaacaaaaaaaccaccgctaccagcggtggtttgtttgccggatcaagagctaccaactctttttccgaaggtaactggcttcagcagagcgcagataccaaatactgtccttctagtgtagccgtagttaggccaccacttcaagaactctgtagcaccgcctacatacctcgctctgctaatcctgttaccagtggctgctgccagtggcgataagtcgtgtcttaccgggttggactcaagacgatagttaccggataaggcgcagcggtcgggctgaacggggggttcgtgcacacagcccagcttggagcgaacgacctacaccgaactgagatacctacagcgtgagctatgagaaagcgccacgcttcccgaagggagaaaggcggacaggtatccggtaagcggcagggtcggaacaggagagcgcacgagggagcttccagggggaaacgcctggtatctttatagtcctgtcgggtttcgccacctctgacttgagcgtcgatttttgtgatgctcgtcaggggggcggagcctatggaaaaacgccagcaacgcggcctttttacggttcctggccttttgctggccttttgctcacatgttctttcctgcgttatcccctgattctgtggataaccgtattaccgcctttgagtgagctgataccgctcgccgcagccgaacgaccgagcgcagcgagtcagtgagcgaggaagcggaagagcgcctgatgcggtattttctccttacgcatctgtgcggtatttcacaccgcaatggtgcactctcagtacaatctgctctgatgccgcatagttaagccagtatacactccgctatcgctacgtgactgggtcatggctgcgccccgacacccgccaacacccgctgacgcgccctgacgggcttgtctgctcccggcatccgcttacagacaagctgtgaccgtctccgggagctgcatgtgtcagaggttttcaccgtcatcaccgaaacgcgcgaggcagctgcggtaaagctcatcagcgtggtcgtgaagcgattcacagatgtctgcctgttcatccgcgtccagctcgttgagtttctccagaagcgttaatgtctggcttctgataaagcgggccatgttaagggcggttttttcctgtttggtcactgatgcctccgtgtaagggggatttctgttcatgggggtaatgataccgatgaaacgagagaggatgctcacgatacgggttactgatgatgaacatgcccggttactggaacgttgtgagggtaaacaactggcggtatggatgcggcgggaccagagaaaaatcactcagggtcaatgccagcgcttcgttaatacagatgtaggtgttccacagggtagccagcagcatcctgcgatgcagatccggaacataatggtgcagggcgctgacttccgcgtttccagactttacgaaacacggaaaccgaagaccattcatgttgttgctcaggtcgcagacgttttgcagcagcagtcgcttcacgttcgctcgcgtatcggtgattcattctgctaaccagtaaggcaaccccgccagcctagccgggtcctcaacgacaggagcacgatcatgcgcacccgtggggccgccatgccggcgataatggcctgcttctcgccgaaacgtttggtggcgggaccagtgacgaaggcttgagcgagggcgtgcaagattccgaataccgcaagcgacaggccgatcatcgtcgcgctccagcgaaagcggtcctcgccgaaaatgacccagagcgctgccggcacctgtcctacgagttgcatgataaagaagacagtcataagtgcggcgacgatagtcatgccccgcgcccaccggaaggagctgactgggttgaaggctctcaagggcatcggtcgagatcccggtgcctaatgagtgagctaacttacattaattgcgttgcgctcactgcccgctttccagtcgggaaacctgtcgtgccagctgcattaatgaatcggccaacgcgcggggagaggcggtttgcgtattgggcgccagggtggtttttcttttcaccagtgagacgggcaacagctgattgcccttcaccgcctggccctgagagagttgcagcaagcggtccacgctggtttgccccagcaggcgaaaatcctgtttgatggtggttaacggcgggatataacatgagctgtcttcggtatcgtcgtatcccactaccgagatatccgcaccaacgcgcagcccggactcggtaatggcgcgcattgcgcccagcgccatctgatcgttggcaaccagcatcgcagtgggaacgatgccctcattcagcatttgcatggtttgttgaaaaccggacatggcactccagtcgccttcccgttccgctatcggctgaatttgattgcgagtgagatatttatgccagccagccagacgcagacgcgccgagacagaacttaatgggcccgctaacagcgcgatttgctggtgacccaatgcgaccagatgctccacgcccagtcgcgtaccgtcttcatgggagaaaataatactgttgatgggtgtctggtcagagacatcaagaaataacgccggaacattagtgcaggcagcttccacagcaatggcatcctggtcatccagcggatagttaatgatcagcccactgacgcgttgcgcgagaagattgtgcaccgccgctttacaggcttcgacgccgcttcgttctaccatcgacaccaccacgctggcacccagttgatcggcgcgagatttaatcgccgcgacaatttgcgacggcgcgtgcagggccagactggaggtggcaacgccaatcagcaacgactgtttgcccgccagttgttgtgccacgcggttgggaatgtaattcagctccgccatcgccgcttccactttttcccgcgttttcgcagaaacgtggctggcctggttcaccacgcgggaaacggtctgataagagacaccggcatactctgcgacatcgtataacgttactggtttcacattcaccaccctgaattgactctcttccgggcgctatcatgccataccgcgaaaggttttgcgccattcgatggtgtccgggatctcgacgctctcccttatgcgactcctgcattaggaagcagcccagtagtaggttgaggccgttgagcaccgccgccgcaaggaatggtgcatgcaaggagatggcgcccaacagtcccccggccacggggcctgccaccatacccacgccgaaacaagcgctcatgagcccgaagtggcgagcccgatcttccccatcggtgatgtcggcgatataggcgccagcaaccgcacctgtggcgccggtgatgccggccacgatgcgtccggcgtagaggatcga

SEQ ID NO: 534 - DNA, 1353 bp, Artificial Sequence
  hMMP-1
  CDS (1)...(1353): Pro MMP-1
  CDS (241)...(726): Catalytic Domain
  CDS (727)...(774): Linker Region
ttcccagcgactctagaaacacaagagcaagatgtggacttagtccagaaatacctggaaaaatactacaacctgaagaatgatgggaggcaagttgaaaagcggagaaatagtggcccagtggttgaaaaattgaagcaaatgcaggaattctttgggctgaaagtgactgggaaaccagatgctgaaaccctgaaggtgatgaagcagcccagatgtggagtgcctgatgtggctcagtttgtcctcactgaggggaaccctcgctgggagcaaacacatctgacctacaggattgaaaattacacgccagatttgccaagagcagatgtggaccatgccattgagaaagccttccaactctggagtaatgtcacacctctgacattcaccaaggtctctgagggtcaagcagacatcatgatatcttttgtcaggggagatcatcgggacaactctccttttgatggacctggaggaaatcttgctcatgcttttcaaccaggcccaggtattggaggggatgctcattttgatgaagatgaaaggtggaccaacaatttcagagagtacaacttacatcgtgttgcggctcatgaactcggccattctcttggactctcccattctactgatatcggggctttgatgtaccctagctacaccttcagtggtgatgttcagctagctcaggatgacattgatggcatccaagccatatatggacgttcccaaaatcctgtccagcccatcggcccacaaaccccaaaagcgtgtgacagtaagctaacctttgatgctataactacgattcggggagaagtgatgttctttaaagacagattctacatgcgcacaaatcccttctacccggaagttgagctcaatttcatttctgttttctggccacaactgccaaatgggcttgaagctgcttacgaatttgccgacagagatgaagtccggtttttcaaagggaataagtactgggctgttcagggacagaatgtgctacacggataccccaaggacatctacagctcctttggcttccctagaactgtgaagcatatcgatgctgctctttctgaggaaaacactggaaaaacctacttctttgttgctaacaaatactggaggtatgatgaatataaacgatctatggatccaggttatcccaaaatgatagcacatgactttcctggaattggccacaaagttgatgcagttttcatgaaagatggatttttctatttctttcatggaacaagacaatacaaatttgatcctaaaacgaagagaattttgactctccagaaagctaatagctggttcaactgcaggaaaaattga

SEQ ID NO: 535 - protein, 9 aa, Artificial Sequence
  fluorescence substrate
  VARIANT 1: Xaa = 7-Methoxycoumarin-4-yl)acetyl
  VARIANT 7: Xaa = 2,4,-Dinitrophenyl)-L-2,3-diaminopropionyll
XKPLGLXAR

SEQ ID NO: 536 - protein, 6 aa, Artificial Sequence
  fluorescence substrate
  VARIANT 1: Xaa = N-carbobenzyloxy
  VARIANT 6: Xaa = 7-Amino-4-Methyl Coumarin
XHRYRX

SEQ ID NO: 537 - protein, 450 aa, Homo sapiens
  allelic variants of MMP-1
  VARIANT 4, 10, 254: Xaa = Pro
  VARIANT 30: Xaa = Met or Ser
  VARIANT 96: Xaa = Arg
  VARIANT 114, 172: Xaa = Val
  VARIANT 166: Xaa = Cys
  VARIANT 181: Xaa = His
  VARIANT 189, 298, 387: Xaa = Thr
  VARIANT 200, 286, 432: Xaa = Ala
  VARIANT 214: Xaa = Glu
  VARIANT 232: Xaa = Asn
  VARIANT 233, 314: Xaa = Gly
  VARIANT 243, 315, 391: Xaa = Ser
  VARIANT 374: Xaa = Met
  VARIANT 386: Xaa = Gln
FPAXLETQEXDVDLVQKYLEKYYNLKNDGXQVEKRRNSGPVVEKLKQMQEFFGLKVTGKPDAETLKVMKQPRCGVPDVAQFVLTEGNPRWEQTHLXYRIENYTPDLPRADVDHXIEKAFQLWSNVTPLTFTKVSEGQADIMISFVRGDHRDNSPFDGPGGNLAHAXQPGPGXGGDAHFDEXERWTNNFXEYNLHRVAAHXLGHSLGLSHSTDIXALMYPSYTFSGDVQLAQXXIDGIQAIYGXSQNPVQPIGPXTPKACDSKLTFDAITTIRGEVMFFKDRFYMRXNPFYPEVELNFXSVFWPQLPNGLEAAYXXADRDEVRFFKGNKYWAVQGQNVLHGYPKDIYSSFGFPRTVKHIDAALSEENTGKTYFFXANKYWRYDEYKXXMDPXYPKMIAHDFPGIGHKVDAVFMKDGFFYFFHGTRQYKFDPKXKRILTLQKANSWFNCRKN

1. A method for treating a disease or condition of the extracellular matrix (ECM), comprising sub-epidermally administering to the ECM an activatable matrix-degrading enzyme (AMDE) and an activator, wherein:
the AMDE is inactive in the ECM in the absence of the activator;
the activator, when administered to the ECM, provides an activating condition for the enzyme such that the AMDE is active; and
the activating condition is not present in the ECM prior to administration of the activator.

2. The method of claim 1, wherein the activator dissipates or is neutralized such that the AMDE is active for a limited or predetermined time.

3. The method of claim 1, wherein the activator is provided in the same composition as the AMDE or in a separate composition.

4. The method of claim 1, wherein the activator and the AMDE are administered sequentially, simultaneously or intermittently.

5. The method of claim 1, wherein the AMDE is exposed to the activator prior to administration, such that the enzyme is active upon administration.

6. The method of claim 1, wherein the AMDE is exposed to the activator upon administration, such that the enzyme is active upon administration.

7. The method of claim 1, wherein sub-epidermal administration is selected from among subcutaneous administration, intramuscular administration, intralesional administration and intradermal administration.

8. The method of claim 1, wherein administration is subcutaneous administration.

9. The method of claim 1, wherein the activating conditions are selected from among pH, ionic strength, temperature and metal ions.

10. The method of claim 1, wherein the enzyme is substantially inactive at neutral pH.

11. The method of claim 1, wherein the activating condition is pH.

12. The method of claim 1, wherein the activating condition is an acidic pH.

13. The method of claim 1, wherein the activating condition is pH and the activator is a buffered solution at the pH.

14. The method of claim 13, wherein the ionic strength of the buffer is selected such that the AMDE is active for a predetermined time upon exposure to the ECM.

15. The method of claim 9, wherein the activating condition is a metal ion and the metal ion is Ca²⁺.

16. The method of claim 1, wherein the AMDE is selected from among a cathepsin, a calpain, and a heparanase.

17. The method of claim 16, wherein the AMDE is a zymogen.

18. The method of claim 16, wherein the AMDE is a mature protein that is a single chain or two chain form.

19. The method of claim 16, wherein the AMDE is a cathepsin and the cathepsin is a cysteine protease or aspartic protease.

20. The method of claim 16, wherein the AMDE is a cathepsin and the cathepsin is selected from among cathepsin S, cathepsin K, cathepsin L, cathepsin B, cathepsin C, cathepsin H, cathepsin F, cathepsin O, cathepsin R, cathepsin V, cathepsin W, cathepsin D and cathepsin E.
the AMDE is a cathepsin

21. The method of claim 20, wherein the cathepsin is cathepsin L.

22. A method for treating a disease or condition of the extracellular matrix (ECM), comprising administering an activatable matrix-degrading enzyme (AMDE) and an activator, wherein:
the AMDE is inactive at neutral pH;
the activator provides an acidic pH activating condition for the enzyme such that the AMDE is active upon or after administration;
the activating condition is not present at the site of administration prior to administration of the activator; and
the AMDE is substantially active at pH 5.5.

23. The method of claim 22, wherein the activator dissipates or is neutralized such that the AMDE is active for a limited or predetermined time.

24. The method of claim 22, wherein the activator is provided in the same composition as the AMDE or in a separate composition.

25. The method of claim 22, wherein the AMDE is administered together or separate from the activator.

26. The method of claim 22, wherein the activator and the AMDE are administered sequentially, simultaneously or intermittently.

27. The method of claim 22, wherein the AMDE is exposed to the activator prior to administration, such that the enzyme is active upon administration.

28. The method of claim 22, wherein the AMDE is exposed to the activator upon administration, such that the enzyme is active upon administration.

29. The method of claim 22, wherein administration is selected from among subcutaneous, intramuscular, intralesional, intradermal, topical, transdermal, intravenous, oral and rectal.

30. The method of claim 22, wherein the pH of the acidic pH activating condition is or is about in a range of 3 to 6.5, or 3.5 to 6, or 3 to 5.5, or 3 to 4.5, or 4 to 6, or 4 to 5.5, or 4.5 to 5, or 5 to 6.

31. The method of claim 22, wherein the pH of the acidic pH activating condition is about or is 3, 3.5, 4, 4.5, 5, 5.5, 6 or 6.5.

32. The method of claim 22, wherein the activator provides the acidic pH activating condition as a buffered solution at the acidic pH.

33. The method of claim 22, wherein the AMDE is a lysosomal enzyme.

34. The method of claim 22, wherein the AMDE is a zymogen.

35. The method of claim 22, wherein the AMDE is a mature protein that is a single chain or two chain form.

36. The method of claim 22, wherein the AMDE is a cathepsin or a heparanase.

37. The method of claim 36, wherein the AMDE is a cathepsin and the cathepsin is a cysteine protease or aspartic protease.

38. The method of claim 37, wherein the cathepsin is selected from among cathepsin B, cathepsin F, cathepsin H, cathepsin K, cathepsin L, cathepsin V and cathepsin D.

39. The method of claim 38, wherein the cathepsin is cathepsin L.

40. The method of claim 39, wherein the activator is an acidic buffered solution that is or is about pH 5.0.

41. A method for treating a disease or condition of the extracellular matrix (ECM), comprising administering to the ECM an activatable matrix-degrading enzyme (AMDE) and an activator, wherein:
the AMDE is inactive in the ECM in the absence of the activator;
the activator, when administered to the ECM, provides an activating condition for the enzyme such that the AMDE is active;
the activating condition is not present in the ECM prior to administration of the activator; and
the activator is selected from among metal ions, temperature and ionic strength.

42. The method of claim 41, wherein administration is selected from among subcutaneous, intramuscular, intralesional, intradermal, topical, transdermal, intravenous, oral and rectal.

43. The method of claim 1, wherein upon or after administration the AMDE cleaves any one or more extracellular matrix (ECM) components.

44. The method of claim 43, wherein cleavage of any one or more ECM components is for a limited time.

45. The method of claim 43, wherein cleavage of any one or more ECM components is for a predetermined time.

46. The method of claim 43, wherein the one or more ECM components is selected from among a collagen, an elastin, a fibronectin or a proteoglycan.

47. The method of claim 46, wherein the ECM component is collagen and the collagen is selected from among type I, type II, type III or type IV collagen.

48. The method of claim 47, wherein the AMDE has increased substrate specificity for type I collagen over type IV collagen.

49. The method of any of claim 1, wherein the disease or condition of the ECM is a collagen-mediated disease or condition.

50. The method of claim 49, wherein the collagen-mediated disease or condition is selected from among cellulite, Dupuytren's disease, Peyronie's disease, Ledderhose fibrosis, stiff joints, existing scars, scleroderma, lymphedema and collagenous colitis.

51. The method of claim 50, wherein the collagen-mediated disease or condition is stiff joints that is frozen shoulder.

52. The method of claim 50, wherein the collagen-mediated disease or condition is existing scars that is selected from among surgical adhesions, keloids, hypertrophic scars and depressed scars.

53. The method of claim 1, further comprising administering a pharmacologic agent selected from among other biologics, small molecule compounds, dispersing agents, anesthetics and vasoconstrictors, or combinations thereof.

54. The method of claim 53, wherein the dispersing agent is a hyaluronidase.

55. The method of claim 54, wherein the hyaluronidase is PH20.

56. The method of claim 54, wherein the hyaluronidase is soluble.

57. The method of claim 53, wherein the anesthetic is lidocaine.

58. The method of claim 53, wherein the vasoconstrictor is an alpha adrenergic receptor agonist.

59. A method of treating a disease or condition of the extracellular matrix (ECM), comprising sub-epidermally administering an activatable matrix-degrading enzyme (AMDE), an activator, a hyaluronidase, lidocaine and epinephrine wherein:
the AMDE is inactive in the ECM in the absence of the activator;
the activator, when administered to the ECM, provides an activating condition for the enzyme such that the AMDE is active; and
the activating condition is not present in the ECM prior to administration of the activator.

60. The method of claim 59, wherein the AMDE, hyaluronidase, lidocaine and epinephrine are administered simultaneously, sequentially or intermittently, provided that the lidocaine is administered prior to the AMDE.

61. The method of claim 59, wherein:
the hyaluronidase, lidocaine and epinephrine are administered prior to administration of the AMDE; or
the hyaluronidase, lidocaine and epinephrine are administered simultaneously; or
the hyaluronidase, lidocaine and epinephrine are administered in a single composition.

62. A method of treating a disease or condition of the extracellular matrix (ECM), comprising administering an activatable matrix-degrading enzyme (AMDE) and an activator wherein:
the AMDE is inactive in the ECM in the absence of the activator;
the activator, when administered, provides an activating condition for the enzyme such that the AMDE is active;
the activating condition is not present in the ECM prior to administration of the activator; and
the activator is selected from among a metal ion, temperature or ionic strength; and
administration is selected from among subcutaneous, intramuscular, intralesional, intradermal, topical, transdermal, intravenous, oral and rectal.

63. A method of treating a collagen-mediated disease or condition, comprising sub-epidermally administering to the ECM a therapeutically effective amount of an activatable cathepsin L and an activator, wherein:
the activatable cathepsin L is inactive in the ECM in the absence of the activator;
the activator, when administered to the ECM, provides an activating condition for the activatable cathepsin L such that the activatable cathepsin L is active;
the activating condition is not present in the ECM prior to administration of the activator; and
the activating condition is acidic pH.

64. The method of claim 63, wherein the cathepsin L has a sequence of amino acids set forth in SEQ ID NO:1 or is an allelic, species or other variant thereof.

65. The method of claim 64, wherein the other variant has at least about 70% sequence identity compared to a sequence of amino acids set forth in any of SEQ ID NO: 1 and retains cathepsin L activity.

66. A container, comprising two compartments, wherein:
a first compartment contains a therapeutically effective amount of an activatable matrix-degrading enzyme (AMDE), wherein the amount is for single dosage or a plurality of dosages and a single dosage is effective for treatment of a disease or condition of the ECM; and
a second compartment contains an activator, wherein the activator is one that activates the AMDE.

67. The container of claim 66, further comprising a mixing compartment.

68. The container of claim 66 that is a syringe.

69. The container of claim 66, further comprising a needle for injection.

70. The container of claim 66, wherein:
the activator provides an activating condition selected from among pH, metal ion or ionic strength, and the activator is provided in a liquid solution or suspension.

71. The container of claim 66, wherein the AMDE is selected from among a cathepsin, calpain and a heparanase.

72. The container of claim 71, wherein the AMDE is a cathepsin and the cathepsin is a cysteine protease or aspartic protease.

73. The container of claim 72, wherein the cathepsin is selected from among cathepsin S, cathepsin K, cathepsin L, cathepsin B, cathepsin C, cathepsin H, cathepsin F, cathepsin O, cathepsin R, cathepsin V, cathepsin W, cathepsin D and cathepsin E.

74. The container of any of claim 66, wherein the AMDE and activator are provided in an amount for multiple dosage administrations.

75. The container of any of claim 66, wherein the AMDE and activator are provided in a single unit dosage.

76. The container of claim 66, wherein the AMDE is lyophilized.

77. A container, comprising two compartments, wherein:
a first compartment contains a therapeutically effective amount of an activatable cathepsin L, wherein the amount is effective for treatment of a disease or condition of the extracellular matrix (ECM); and
a second compartment contains an acidic buffer that is one that activates the cathepsin L.

78. A combination, comprising:
the container of claim 66; and
one or more additional containers containing another pharmacologically effective agent selected from among biologics, small molecule compounds, dispersing agents, anesthetics and vasoconstrictors and combinations thereof.

79. The combination of claim 78, wherein the pharmaceutically effective agent is a dispersing agent that is a hyaluronidase.

80. The combination of claim 79, wherein the hyaluronidase is PH20.

81. The combination of claim 79, wherein the hyaluronidase is soluble.

82. A combination, comprising:
the container of claim 77; and
one or more additional containers containing another pharmacologically effective agent selected from among biologics, small molecule compounds, dispersing agents, anesthetics and vasoconstrictors and combinations thereof.

83. The combination of claim 82, wherein the pharmaceutically effective agent is a dispersing agent that is a hyaluronidase.

84. The combination of claim 83, wherein the hyaluronidase is PH20.

85. The combination of claim 83, wherein the hyaluronidase is soluble.

86. A kit, comprising the container of claim 66, a device for administration and, optionally instructions for administration.

87. A kit, comprising the container of claim 77, a device for administration and, optionally instructions for administration.

88. A combination, comprising an activatable cathepsin L and a hyaluronidase, wherein the cathepsin L and hyaluronidase are provided separately and/or are in lyophilized form.

89. The combination of claim 88, wherein the hyaluronidase is rHuPH20.

90. A pharmaceutical composition, comprising an amount of cathepsin L for treatment of an ECM-mediated disease or condition upon administration simultaneously or sequentially with an acidic buffer, wherein:
the composition is formulated for single dosage administration; and
the buffer has a pH that activates cathepsin L.

91. The composition of claim 90, further comprising one or more of lidocaine, epinephrine and a hyaluronidase.

92. A method of treating a disease or condition of the extracellular matrix (ECM), comprising sub-epidermally administering an activatable matrix-degrading enzyme (AMDE), an activator, a hyaluronan degrading enzyme, lidocaine and epinephrine wherein:
the AMDE is inactive in the ECM in the absence of the activator;
the activator, when administered to the ECM, provides an activating condition for the enzyme such that the AMDE is active; and
the activating condition is not present in the ECM prior to administration of the activator.

93. The method of claim 92, wherein the hyaluronan degrading enzyme is a hyaluronidase.

94. The method of claim 93, wherein the hyaluronidase is a soluble hyaluronidase.

95. The method of claim 94, wherein the soluble hyaluronidase is a PH20, or a truncated form thereof.
